United States Patent Application Publication US 2015/0354009 A1 - sequence listing, part 12

SEQ ID NO: 289 - DNA, 429233 bp, Homo sapiens
atctttgatcaatgtacttgccagggagagcccaagtccttcaaacctcctccttttcaccttcatccttaactttgtgctagagcgagacccacacaacaacagccgaccctccccgccccacccccacccccaaaccagccctcgatcccagcccccggagaggactcgcatttcgacttgcgggacacttttgtgcgttcctctccagagcgcctctcgtgctcgcccctcttgcgctcgctctttattaccttcacctccttttctcccccttctctccctttctccttctcgttctctcccggagttgttgttgcccccctcgctccttctccccccttttttccccttcccctcccgggggtgtgtggcaacttttcctctcgcttctcctccgtctgtttccccttatatgtgaccatggcagtgccggcggctttgatccctccgacccagctggtcccccctcaacccccaatctccacgtctgcttcctcctctggcaccaccacctccacctcttcggcgacttcgtctccggctccttccatcggacccccggcgtcctctgggccaactctgttccgcccggagcccatcgcttcggcggcggcggcggcggccacagtcacctctaccggcggcggcggcggcggcggcggcggcggcagcggaggcggcggcggcagcagcggcaacggaggcggcggtggcggcggcggcggtggcagcaactgcaaccccaacctggcggccgcgagcaacggcagcggcggcggcggcggcggcatcagcgctggcggcggcgtcgcttccagcacccccatcaacgccagcaccggcagcagcagcagcagcagtagcagcagcagcagcagcagcagtagtagcagcagcagcagtagcagcagcagctgcggccccctccccgggaaacccgtgtactcaaccccgtccccagtggaaaacacccctcagaataatgagtgcaaaatggtggatctgaggggggccaaagtggcttccttcacggtggagggctgcgagctgatctgcctgccccaggctttcgacctgttcctgaagcacttggtggggggcttgcatacggtctacaccaagctgaagcggctggagatcacgccggtggtgtgcaatgtggaacaagttcgcatcctgaggggactgggcgccatccagccaggagtgaaccgctgcaaactcatctccaggaaggacttcgagaccctctacaatgactgcaccaacgcaaggtgagtcgggggggatagcccccgccgcccgcgccccttcccaccagcctgctcgcctgccctcgctcctttcccggcgccgctcgctctgcgcgcccgcgagccgcgcgccccggcgagcgcggccctctcctctccctgctcggggctcgccagccgcgcccgaccccctgagaagttggcacctcaccctgcccagacctcgctcttcggcccggtcctccccttgccctctgggtcccggggatgggctgctgtgggatgtgggaaagccgagcctcggggcggaggggacgagagggaggaggacggcgcctttgctggagccacagccccctgccccgggcgcgcgggcgcctggagacccctctcagcgctgctgtccgcgttcgtgcgctccccaggacctgggttccacggccagcctcccggcaccgacagggctgatctgtggcgccgagcggtgtcccgggggcggggggaggtcgtgacctgctccgcagggctcggggagcggggagacgcgctccgggtgagggccccgctgggaaaggcgagggagcggaccagcacccgaggagggcactttgaggtcgggagggaaatgacccgcgaagctgagagaccgggtccatcccgggggatgggctccggggacttgagctccgaagcccggaggggaagccagccgaggggaggggtctgtgtgttcgcgcatgtgtgcgtgtgtccgcgtgtgagcgagtgcgtgtgcaaaggaaataaaggggtacggtggccccggggcagatgcgagggcaaccagcaggttttcttcggtagggggaggtgaccgattgcccgagactcaatggaagctgaactggagagattaggaaggaaagccacggagcgcgctctctctcgatctctctttcgagttctctgtctctttctctccaaagtgtgttttctttctgtctttctctctcttttcttttcttaaaggttagtagcttaagcagcgagcaggtgcacactttgcactgggatgctcagcggccctgatactctgtgccttggcttccccagcccagcaaagcgcgcgcacggaggaggcggcgggaccggtccccagccagaccagttttatgctaatgaacgctcagtgggggaggatctaccaagagggggcgggagtggggcaacttgtcagtttcggggtagagatgatcattccaccccctttcacagcgccgctttgtccccacggttctctgcaaggaagcgcagaggcaaaagttcagagtgagattccgggagaaagaaaatagggaaagttgaagacctgaagcgggcacgtgggaactgcgcgcaaaatttgcgcagaaacttcggtaccctccaaataagtttgaagattgagagaaggagcggagttagtgtgtgctcccgcagagatagggaaacttaggtggaaaggaagtgtagcaaggagaccagaaggacattgggttgaaaaagcgctagctcttttttccatggagaaagacttcttctctgttagtgcccgggaaggctgtgaaacgaaaaagattcgaattccagtccagcaaatgtcctatcctgacctagccagaaattcttttccgtgtttaggtattcttccttccatgggacttgggtgtgtttgggctttgaaccttcgactattttggggtaaatgttgtgtgtgtgtgtgtgtgtgtgtgtgtgtgtgtgtatgtgcgcgcgcgcgctcaaaagtatggacaggtggcagtaaagatggggggtggtgggggtcgcggaagcaagatcactaaacgtcatttactcagataattggagttcttggtcgtgcagaatgtaaaatatttgcccaaaatctatattaaaactatttgaatcaggacaggaaaattgttctggagttatgaagaaagctaggtgaaatttgaagctagttcagatacgattgttataaaattgtctgcctatccagtaaattggtgaattgctactttttttttctctttaataatcaaacatctactctcctcggtatcctctttatgtgtttcttacagcacactagatactagataattaaaggccatttcacatacacacacgtaaacacaaaaaattactggagaaaactttcttcaatgactgcattataataaatgttataatcaatgttaaactcgatttattccctgaatttttgcctagatttgaagtcctcaccatgtggttggagaatattctttaacttttaactaaatatttttcaagttttttccccctgaggttaacaacagatctggagtttaaacttgcagagccaagataagttaaatccagtggaactgtttatctcttcacaaatatctcatcactactgtaattatgtttcagtcacctggccttaataatttgcaattacatgtgttgctctaaaaccctatttcaagttatttttaagttaaaggcgggaagtttgttgatttagtattgtatttgatcatatatcaactaaaaaagcttactcaaacttaaatacatgcaatattgtagtcattaacttgagaaggtgtttagttgcaaatacctaccttggttttcctaactctgccactgattgaagaaattgagaacttgtaatggaactccctctcaccaaatatactgtttaccctatattattatttttaatgattattataagcattattgtcttatttcttacctttgaaagctttgaaatgttttgcatcttgcatttataaaattatgattacttttttcattcaagtcaagtttatatctttgctgtgaagaaccttttttattcacctagatgtattgatttatttcactttggtttctttctcctctagctacttaacaggctaagggagtaatttatgtagagtataagagaagctgagcaagaagggaaactgtataaaattactatctatacacccatatatgtgtgtatataatttatacatgcacatatcataatttatatacaatgagaaacatcaaatcttagcactctcagctttttacagaaactatgtctatctcttaatagcatggaataataataccagggattttgaggaaccgaaatgatgttacagaaaagtaaggttcataaacttgctcaaagtggctcagtaagttagtagcaaaccttcgagtggttttaatttgcttagggctattgcattagtatgttatctatgaaaactagaataaatgttgaagccatctgtcattaccacaaggaggtgaaaaagagactatcacctgctagacagtaaagctaaaaaataaaggtctcaaaacatgaaagaaatgtaaagctaaaaaataaaggtctcaaaacatgaaagaaatgtaaggacatatatttaaaagttgtcaaaggacaaagtctgtccttgatcagcttcctccaattattatttcaaaactaaacattagttgcatgaacttggctgttgcaacagaggtcagttaattaactgcttaccattaaataacaacaaaaaaagaaaagtaattatgtacatggtcaaatctctgtttgtataagtcagttccctttttgtagatttgggttaggattcaattttccacgaattcaggttttaaaaaagtgaccctgttttattatgttatctaaaatattcatttctttcattgttgtaagaagataattttttctcaggatctttcaaacaagattgtgatgtaggttctaagtaaccctagatttgaggggtttttaacttaagtagattccagttagtcttatatattttttaggcacatacatatattcacaaacagaattcttttgtcttaaaataccatccatggacaaaatattgaaagtgttttatgtttcagtagtaatatatgaatgaaattgtagtgtaagaagtacaaaacattttccaactcttgactctatttttttttttttttttttttggttaggagttttaataaagatggcaaaccgaaccagtctatatttatttaacatttgccctgttgcctggttttcaatgacacagacttatgcattgatatagaaagtttaacataaatatagattcacttctaacagataattacaatacttggcacagagaaattaaagaattgcttcaaatgaagagagactctgcttttgaagttttcgtattacagtagattaatgcttccaataacgcctaatgtctcattttatatcatttcaaaaagaatagggcataattagaagactaaagcttaaatatgaaagtttgcttggttccacaatttatttctgtatgtttttaaagtgttagcaaattacactttaataactagtgtatgaataaaatataagaatattctaacctagaatttactttgttcagtcaaattatactgcaggatataagttgttgagttatttggataatctcttccaaacctgttgtttttctaagagttagtctctcacaatatcgtggttatttttgtcaaaagtgaacatggttatgatgatactttactttctgaactccacatttagttaatgctctgatgtaagaaatttgatttgtacatatgatattttattttgtgaagcttcaaatattatataaaataaactacacgacaggcttttttcctctagaaaaattctggtattcacatttgacacatagttttaaaatcttcatttttttagtccaaatctgctttttttttggattattctattaaatctcactccagtttcatgtcaactactgggacaaatattaaccaccctctttttgcctcactgcatcccccaactccctgagatgtgacaccctatattgactaaagtcttggcaggatttgagcataaatcactcttgtctttggcgatttactacgtgtgattcaccagcatatgaaaacatgatatgctttattgtttctcatttgatgttttgtttttagagtataagtagcattagtaaattagcttaatgtgcaaccaagtagttgttattttaagaacaatttgtgctttaactatcaattagtattattttatctttccaagttattttactaaattgcttcatacaattgcttttgtcagtcaagtaaaatagtcatttcgattgcattgtatgagcaacatagaaaacaactactgcaaaatataatgggaaattaaactctcacaggttgtaaactgtctccctttgaatccttgtctgaagaaattaatttgaactatgccttctaaataggtacaggtgagtcatctagatttcattaaacatttttattttaaggtttttgttacttggttcttttaaaaagttaaactttgtttgaatttatctttcaagtatttccttttcagcttgttcaccaaaaaaaaaaaaaaagtcacattaagttatatatctttagaataacaggaaatgtaaaaatggatattattggcttgggtatttaaaaatgtaattaagataaagttttatcattttatgtttgaattgttataaaaatagaatgaccttagcatatgtcagcatgtgccattttcttactgaggtaatgctttgtgattggccagtttaagagatgtatatctgcatgcatgtgtgtgtgtgtgtgtgtacatacgtatgtctaaatactacatattatatgtagtatattaatatatttatatagtatatgtagtttgaatattctagctaagactacacttatattttcaggctttgggactgcattaaggagacccttctctattatgtttgttatgttcaataattaaatttttaaagaagaaaactatgaattaagagcccacctaatggagctcagataagtgtaacagcaaaggctctgatctgcacagatatgtacatctcaggcacagcagaggctctgtgcaaacctacattttgctcaaatttcttgtttccttcttctcaatctgccaaaaatatttctagtaaaaagtaatttttgctactgtggctgtcttgtaactaacttttatttgctgatattcgctttttagcaaatgtcacatacaggaatgacttcattaggatagtatagttagtttaccaaattattgctttggaaaacaagaataccaaggataagatatttatatttggtccactaattagttattattagattactggtggattactttatttgttacacctatttattttaaggaggtttctgagaatctgttaagagtgtgtccattgttgctagttttaggcagctaatgattagctttatatataaatgtacaaatgacaatgaaaagaattttcaatccactataaattagttattagacaatcaataaaaaggtcattgtttttcaaattaatgatacaattaaaattaatttaatgaatagcagataaatgtccaattaaaaaatatatgtcacatcacatataatgacccaaatcaccacttgatccaaagtcaaggaccttgaaccaaatgcatttaaaatgtattggtttattcggacatagatttcctttataagagaaaagcattcgaattcacccatttaaaaaaaatcatctttcattctttctaaattggacattaaatttgccaatgactgcattgtgttaaaggtgtggtccttttgctttctgatccaaattggcttggaattgatccaggatttcaagctgggattcttctgcacatttaaatgtatgtgacttgattggaagttgtcaaagacaactcattaaactggaaatctcactatgtcattgtttaattggtctttttttgttgttgttataagtatattgaagtgttgtaaactacaagcacagcaacacactgaatagccagttactttttaaaaaagttttagagagtagtgattgatactgagagagagacacacagagagagagatacagagagagagagagagagagagaggcagagagaggcagagagagagagtgcttaactgaagtatctataataatgtaccgtacaggttgaatacaatacctggaatacattacatttttctagcaggaagtaaaagtgaaataagccaggcacagaaagacaaatactgcatgatatcacttacatgtggaatctaaaaaagttgaactcatagatgcagagagtagaatggtggttaccagggactggagagctgttggtctaaggttacaaaatttcagttagataggaagaaaatgttgtacaacgtggtgattatattttctatgatttgaaaaatagaaataaatatactttgatttgactataagtagatctttaagaatcctgaagtggattttgaagatagcctatatttttgacaaaaaaaatatggatatacttttaaagcatgattttcatgaagcaaatactgcaataggccacatagtacattggttgatgttgattggtaacattgaataattgagaaatgtttttgtttccttagcgtatatgaatggagtggtaaacatgaagtattaaaaagtcacagtgttaaatgatctttgaatttgtatggtatcaagtgtttgtaaataattagattgcctttccagttacaacaggaaaaaaataaccttatttttcttcaagggcaaacaaaatatatcttaagaaagaaagtgtactacttgaaagggagatattttatggaaacatacagaagcatttgcagtaaatatttatcaattccatttaagggatactggtcatttcttcagtaaaggcaatgaaaataaatctctagaatatgttaactaagaaatagtgtattacattcacttatcaggcagatggagtattttgttaaaatcttaaactgtatcctgatattttattagtagcaacagtaaatgggctgttttattcatagtcttatattttaaagacatattgtttatgtatgaacaaagtaaatcacttaaggtgtaacaaatctttgaacccatcatagttctgctaaaatatactgatgcattcaacagtattactttctattttatgtttcaaatttaggatttttatttaatttgattattcaaaatgatattatcttcttgagttaggcacttacacttaaatagtgccttttgattttaaaagaataacctggaacacttttatttttcataatacctgtcacacattttatatgaggatgaatgttcttgtgtgtgcaacaagtgtaaaatttttatcagtagtttagagaactctgtggtggatattttttatatgtattagcattagctcatttgtactctatgctttaaataattgtcgtacatttggtagaaaagcctttacatacatgtatatgtgttgtgtaggaatacattcacacacacacacgcaaacataacatatacacctgtaggatgtagggccacaggacaaataacttaggaaaatacaattggctttaattttacctttttgtagcacataaaaacatgaaacaatacatcaataaacaggtcctattttactgaaatacaacagaaaaaaagaattaattttagagttaaagaagtagtttatacttaaatattttagatataattatgcaaggctatatggttattaggacagtgattaaaaacagcttaatttttctaaaccttttttatgataatgtactttaaattctctgtttaaaaatatatgtataagaattattttatttgtataaaatagatattaaacgattgggtattagaatctgtacattattaaatgacactacatgtgcttgatgcccttgctctctttcttttattggtttatttcattgcttcttgcacttagagccagcatatcctttagaatcagtgaataaatgataggaaaacaatttcataacataaaggaaaagagactgttctaaaagctttgccatcaatgagatgagttaggaatgaggtcagtgggttaatctgcaggtctacataaggagatgtgtattaccacttcttgcagtggactataattgtctttgaaaacacctagtaaagatccagttaaattgaaatcaattactttctcaataattccatggcctatgtcaagtcattacgtcatcggtaagagtgcaagcaggcatacattttttgcaacatagaaagacgcttataaaacagtgatgacttagaagtttctgcttcatctaaagcttatggaattaaaaaaactttgtacaaaatataaaaccttgtacacagtattcggtaaaaagttcatctttgcatttagatatttacataaatacaagtatttcacattactttttgcatcttctggtaggagaaagtataagtaagtgaaaatagtttcaaaatattttatgattgtcatctctgacacctttattcttaccctctaagaatgctctgataagtgtgtactataatcaaagatgaatatatgtctgctgttcactgatttttttcttacgcactgttgacagtatggtacatgcagatttgaacttgtagccaggaacagtgcttccatgcttcaaattgccaaaagacccccagggacagaaacttgacctgcttttatgaaaccatagaattacatttatacaagttaccccatgggaaaggaatgaactgatcccaattcaaaccttaatattggagccttctgggtcaaatttgatttttctttctgttaacacctgtttggctaccatatttagtacctttattcttaagaaattaaaaaaatattattcatcagtggtatttcacagttaagccaaagtgccatcaaaattttgcagctatttaagttttctcatgctattaaaatgttactttttaaaacaaaattcttctctttatgtatatatcctagatttaaggagtataaacacaaatttaattagatataaaaacaactattttgtactttttaatcaatttctctttactaatgagtcagtccaagtaggagaagaaacttttttaggaccttttccttgtaataacatttccaaataaggatttttctaggaatatatttaatttttcttagagtcacactttaaatggttatgtatctaattttgcttttagttggaccacctgacagggtttccagaatgctgcttttgctactactaataataaatgaaggtggtcactgataaactggatgcataaaagatatttttattttagctggattcactttacttacatgaaatgggcctaagttggacagctgaagttaacaatttgttccaaataaagaagaatttaggtgtgtagtagtttgcttcatttctgtactatgctatgtcatataaatgcaaatggataactgatataaatgggtaaggtcatagcatctctacttgtttgacagtattaaatgactgccattagattacagaatcaagacctacttctccatatagaaagacttgctctcaatgttgtatacaccaaaaacatcttatagatggtaaggcaacacatgtatatgctgtcacaattatgatggttaaataattccatcatcgggttttgaaattgaggtgagcaaattccttttcaaattaaaagttaaaaagaattccaaagactttttattcttttctcacttaacattgaataaaccatttggataagtggttattggttatttcccaataagaaccaaacataaaagtctctaataataattatactaaatcaattcttggaatagaggaaaaatattacaattgccagtggaaggtataccactttccttactatcataagtcatgatcatctaggaaaaactatttggagttttaaacatacattgttgattctttttctgttggctgctaagtgacaatccacaaacacttattttcactgtaaattaacaatttttctgccttggccttatacttatcatttgaatgaagatgaaaaatcatatcagttctttggctgtttcctagtatcacctgatgccatatttataaaataccaatatttaattatatacctaatttcatttaaaagtttaccccaactagtttcatggtgatttaacatggctattgcactccactctctctaactgtgatggaaggaaggaaagtaggtagatcataagatcattgtgctggtcttaaaagtaatctatttcagaaaaggcaacctaatctgacttttgtaatggtgatgatatgaagtttctatgaccttttttgtctttcagaggcactttctagctctctttccaataatgattgatgttacacaccacatgaactggaaataaagacacgttaaaaactcttgctataaaatgcatgaaaggagaggggaagttttattttgtaggcaatcctctaaaagtagagtaatccttattactgcacagaattgtacatgatactcaaaataggaagcctttagacaccaaactaaatttcatcttcttacatacccttgtcatccaaattatcataacccacctttattttttttttgaaactctagtgaaattgtgcatgaaatagaaacattttaccatgaaatttacctataaacatctagccaaaaacagaacaaactctggatttttgagctattgatatttagaacagatcccttaaattcaaaattgtgaaatataatacaattgtatttaattacagtattttattccaagcttaggaaataaaattaaaatggcatatttgatctggagtaaacttttttgctctcttttttttggagagtgggttaaataagggcccatgacaggaatgctgtttgtttttcacaaaagttgtttgtgatttcaggtacccttgggaaatctcttgatcagtttcacatctgttcctgtcaaagtgggtgctaagataccggtcacccagcaaccatgtccaagagggaattgggccgataataacttcaaaaaggaatgacagatgctagattaggatgaaagacaaaacgcatgaaaaatgagcttgttagaatcaaaaatttgttcaagcacctttatgcaaattaaatgaatattgaatatttgcatgcagtaatttctactttttcatttgattgaaaggaaaagaatagtgcatttaaactcacaaatgtgacttctttcttttgtactaattaacatacaaagcagaatctcttttttaaaaatcagattagccacctgggttcttagagctccactaagtatattataatgtttttcttatgaaaatggtacattttaagaggacttggtttatctaattttttaataataaacagtgtcatgtgaattaagattattttagatgaatataaatccatttcttgagaaagcctttcaaaagtaaccttatcctgttgtccttgaaattggttaatgtacattaataaaagatcactcaagatgagttcacaccaaaagcacagacttctcattgactggttaaataacaatgcattaaagtaaagcagagtggtgtgccctaaaagaaagtaggcagaaagatctcttcaaaatttaagatgctctttgatacattaccagtttttctattgaactgttcaaatactaatcagaatttagaagagcctgataaaatgtagtgattgagagaggtttctgagtcttggtttagcaatgtctaatgtggtcacgtagagaaattgattttcttcagaaattaattaatttttcatatcgccctaagctgcagttaaaaagagtgcatacttgtctgttttttccagaaatattgcctaatcatattaataccattgccccaaggatgaaaagataattgtacaaatgcatttggaaatatgtatcactgagtatttatgattaaattatgcaaatgacccagctctcatcctttccagacccagattgtctaattaggattgatatgctgaatagatgttccagaatttgaatacaagcatgtccaaggagcagaaaattggaaatgacaaggctgaaatccaaagaaaagtgtctttcgtttctatactttgttaatgtgctgttagcagttgagggttttttccctccctttggctattttgtggctcatatgtccttattagaaacaagtatgcaaaacaaattgaactttagccaatagcattttatttgtatttggtgcttatttaaaaataatctcttggtcattcaaagagagcatcgctattcctttgctccaaacaatgtaaacttacccttaattgggtgaatttttaagcaaacttcctctgaattaggatcacagctttatttcaaagctagctctctaaacttaatggtataccaggacagtattttctaaggatatgcttcttgaatctatagttcatttgttcattccttcacttaaatgcctatcttcttgtagttggagaacactgtttaagcaacagttctgattaggaaaaaaaaaaaaaagcagcactttaaatgtaacaatgtttgaatttgaggtcctcagcaggctttctccctcattgattacactcattcatctcagatggaggggtggtcgcgaagagcaaggaagggactgaactgtcaggactccagcctttgttaagcagcgggtagtcactgcctctgaactcggctggctcctgcttcccatctgcaggatgatggattgctatgtttaatacatttgagcttttgtctgtcatagtgtggacagacagtactatcagtgatttcaacagtgattagaaaacagtttcaaaccattcctattggccagagagcttccagaaatgtctgatgaaacatactcattggtactctcgccatgtaaacgtgtagtttaactaggcggagattgtacactcactgtttaaactgatgcagaagcccactgagaatgactaaaccacatatcaacttttgaagaaaatacacaagacaattttaagaatctctggggtctcaaactaaaaattcatccgaagtagtcccaagtttcagatgaatttgtattctttatatagtaacaacatgtgcttgatggcaggactgtattccataaattatgatgtcagttgttgctatgctcatcagtattgagctatctagcaatattggggtgggggttagaatgtgaggactatgtgaaagcagtaagacaggacttggcatgtgctacgctgggatttgctgagctgtgggggctttgtggttcacaagtccaaagggtgaatgatttcaacaacaagaaggccactatataccagctcagtattctccctggagtgtcttattctatttacaaaactgctgctaataaatacaattagctaaaggaaaagaaactattcttttaagccattaataatataggcaaagttttatttcaagaagggggcataataaataaatcaaaatggccaataacatcattatttactagttataatgtaatatactaaatgtaatgtaaattataatgtaaattataaaatgtgtttaaacatggagttttaactgtagcagtaaataggtaattattaaaataataatccaaccaaagttttgaaacaaaaacctaaatcaggagaagctacttgcctttgattaatctctattaagaaggaggttaaagacaaagtttatgtggtcaacagcaaatgtctgatgagaataagaactccagatcttagattatatttcctcttactgatgttctgacactgaaaaattttcacctggaatcctttcagtaaagatttctggtcttgaatatgtgatcgtaagcatactcatggacgtacatatcacagcacaaatgcgcacatacacacattgcatttcttttgaactagtacaatagctaaagattttgtcatttgacattacttgtttggtaataaggataggttgtactgtacctcctgaaagagttataaaaatattcacatattttacaaattgtcttgttcattgttgcattttaaagttattgaaatagtgctcagcttaaaagctgtgcattcattcagcatattctaaaggagtcatttgtcagagtgactcaaagacagtggccataagtccttctgtatggaaattatataactgggcttaagtaaatctgaatttttaaatccaaattttcacaatttatatagcacatatatagtgaattaatgtattactcctcaacatttttgtactgaatcatgtgtggtttttaaacttttaatagtgaaatattaagtagtttcttattgactttatacttgcacgtcggaggtgggcagggaagtggcgaagtgttcattcttttagagagggataaggtatagaaggaagctattagcaggtcatatctctcaaaatcactgtgttgggagggaggaatcttctatcaagtcaaagggaaatgcatggtttggacaactagagttaaggatcctggccttgcactcctagtggaagattgcatggaagggcccgaaggtgttgagtaatactctgttttaaagtagagctatctcatgaaatgaacataaattactctgttacattacttctctaactatttgttaataaaatttaaggaggtagccagtaatcagtagggacttagggtatcctgactgggagacagactttaacaagaggaaggaagttttgtaccaaatgtactgatgtatacctatgagagctgtagatccttccccaacatattataggaaatataagtgcttggcaaattcaaatgtgtattttgtccatagatggacctgtttgggctgttcaactagatcttgtgcaacattaggagtgtaagcgtatgtatacatttttgtgtacacacgtctggatgtacactgtaggttttcaactcctgttatacacattgttagtcttatgtttagttaggcaccataattacaaagtaatacaagtcatttgtcttactgtagttaaataaacaaaaaatacctgctagaaactaagtgaatgagtttctcatgaagctaaatgaatgaatttgatatctggaaatgtttcagagtggaagaatattagaatcttctctgatctgctccatctgtctctagtacagtggcctctacatgtgtgcacagcagctctggtcttagtgtctagctattactatttggtagatccatagatgggggggaaataaggagtcaggccagcaggttcaacttcttatttctcagtagcttcctataatgattccacctctaatgaggtgaattactactgcatgaaaaaggagaaaaaagggttttggccatcttagctaataaatcacattgactgcctggctgatcagatcaattgtgcataaatcagtgctttaaagagtcttaaaataagattctaccaagaccagtcgatccacaggcttgtgtaacggcaggtctcttgcccatagcaaactgtgcaggggttcacagtattgagacagttacatgtggccaaatgttgaaatgaatgtttcacatctcagaggcatggctctggtgtgtaaagtagttagttgtgactgtcaatggaagtattttcatctcctccagttcacacttgttacttaaggtagcaagaaaatttaattctgaatacatacacaaaactcagttttttaaagcgttagcaacaagtgtaatttttaggaaatgtttcccacaaaaatatcattatgttatttcaaaagaaattgtcattaatatccaagggaagtattttattatcacaatatctctagattttagattaactaatgtatagacaccgtagggtcataagaagagtcaggaaatttgattttaggttccaagtatgtgaattgcctgggtgagtgatgtcggatagtgggaataatggagataacttttctccttatttcagaaggttgtgaagataggaatgcgattagttatttgaaactactgcagaaattgtaaggtgtgtttcaagaattgtcatctgggccaggtgaggtagctcacacctgtaatcccagcattttgggaggccaaggtgggaggatcacttgagcatgggggttccagaccatcctgggcaacatagtgagaacccccccatctgtacaaaaaaattttttttaattagccaggctacttgggaggctgagacaggaggattacttgagccttggaggtcgaggctctgcagtgagctgtgataatgccactgcactacagtctgggtgacagagtgagactgtgtttccaaaaaaaaaaactgaaaaagttgttttctgtttagaattcccaactgaatttttaaaactctcttaccagaagagcttacaaagcacgaagaaaaatctatttttgttcttgctatcacaatttgctcttctttctaaagaaataccaattaaactataacaatctaaaggaagttgtgaattctgaaaaattacaaagtccttatatacatataacgtttattaaaattgtattaacactaactttcaaagaaaatttgaatgacagattaacatggttaaatttttgagaagcaagataagacaaacatagtcatagcatatgtaaaaaaataccatttttttggggggggataatggcttcagtatctatggtaactgtcatgcaactctatgaaaacaggagattctatagaaaattaaagcgggtattattgaatctctgatttctttttaagtaggccagagcattctatgatggctaagtctccagaattttcttaaactaaatacaaaatttataattattctgtaccaagcgtctcccagcacagtgattttgagagatatgaccaagcatctcaagatcccctaaatgattattttctgtagtctcccgttttgaaaataaatttgagctaggcattcaaccatttagcaaaaacttggtgcctgtccaatattttgtgaacacatcaatataatattacctatatccgaatactattgttcttcctttgtcagtagattgattgcagtgccttatgttaatacaccttgtttctcccttattatattgtgaaatttagtaagttgttaaaatcagatctaattgattttctccatggcatttggctacaaaagcatctcatatccaaaattcaccacaggagaagaaatccaggtggattcttttgtggcattttcacttgtgtattaaaaattgtgaaatatttttcatcactgttaacattttaaaatgtagctatatagctacttgctgatagaagatgatacggcgatttttcaaagtcataaatagactttataacttgaatgaattcagtttctggtaactaacatttacttccctgggattattgtggtgtatagttttgtatctatttgtgctaaaaccctcagatactttctagcacatagtaggcacccattataaatgcaatagacttataagaattttgtttgcatattattgaattacttgcaaatgctcttatgaaattcataattatggggcattttgattatgaccaataaattaaaataggaatgcaaatacatatgttttagatttttatatagaaataaaaacaaacaaatgaaaatatatgtaacactagttcttaggtatattacaagatgtctaattcctggatgcttcccatatgctaatggtagtttaagcataaacatatagacttcatatatgtatatactcatatgattttatagggccgaggttttgtctttacctttattattattaattaaggtttgtctatcagattagttatgaaaggtcaccaaatgcataatttttgaagtatctaaacatttaaattgagtggtcagaccaaaaataagagtatatgtattagcagtttgataattacatgctactatttttagtgtttagtgtttgatagggattatattaaatattttaagtacgtggtcaccttcactcccagtaacagctagcagaaataggttctaactattagtttcaaagatgagggcactaaagatcagagcagttagtttacttgcttaaggtttgacagctagtacctgacaagtagaggtaatagaacccaagaaatctcattctgaaaattttatttcctattatattgtcctattcaaatagtacttaaccaaagactatctatctatctacctacctacctatggaagagtctggccttgtcgctcaggccgagtgaggtggcgccatctcggctcactgcaagatccgcctccggggttcaagtgattctcgggcctcagcctcctgagtaggtgtgtgtcaccacgacgggcttatttttgtatttttagtagagacggggtttcaccgtgttggccaggctgcgctccgaactcccaacctcaagtgatccacccgcctcagcttcccaaagtgctggcattacaggcgtgagccaccacgcccggccgatttgacaaatcaacttttatttatttacttttcgttagtctaaatctttgagaggtacagcatcacatggattctgtgtccagtggccttagcaggaagattgcttcggaatttggcatgaaccatgccgctgtttccgtgcgccggagtgaaccttccccagataactctggatttgtttggtttgccgccaggagtcagtgtgctgttctcgctttgtgtacataagcgcatctcttgcccaaatacaattcagtttcttcttgggcataaacaccgtcaattttgagaagaatgagctccctttggttctggagacccactccgcttataactagcaaaaaaaaatggccttcgaccacagccttccagacgtattttcttttagaagtcctgttcccagcaggccccataggctccaagacggcgggaaaagactgaaaaatgttaacgagttcgttatcatcatagggactcttatcacacaacaagcagtaccgataaggtcataatttgcttataagataaaatttaaaattgtagtgttaatttattaatctaatttatatcttcagatagtggtcctcagtggggagaaagtaatacataaggatactggattatggtctattataattccagtcctttcttgacaaattctagttcactctccatacttatttcacaattccatctcgttaatactgtcagagtaagctattttgattatggcttgtaaagcctactgtaggcagtttgtaataaagtttctttccagtttttaaactgatatgtaactatggcaagtttgggagtaggaacttttcctttacatgctgtaatctagaatcagcttcatcatcccatgtcaatgacccacttgtataagttcttccatccagttagtttgccattttttgatgtctttagattattattatttatttttcacagcaaaaaagtattatagtttggtatttggcatcctcatattccatatgaataacttgtttttcatattggcacactttcatgatgtgcaaattccttagtggggtagttcttaactttgcccatctgtgttcattcactttatttataataacatttttagaaaattgacatataacaattgcacatatttatgggatacataatgatgttgtgatacatgtgatcagatcagggtaattaccatatccatcatctcaaacatttatcatttcttggtgttgggaacactaaataatcttccttctagctatttgaacctatatcacatattattaactataggtaccctacagtgctatagaacactagaattgactcctcttatttagctgtaattttgtgttgtttaacaaatctcttcctcttccctcctttctcctgcccttcccagcctttagtatccactgttctactttttacttctgtgacatcaactttttgaagcttccacatgaatgagaacaagtagtgtttaactttctttttctgtcttaactacatttaacataatgtactccagttctatccatgttgccttgaatgagaggatttcattcttttttatggctgaatattgttccacattttctttaatcaagtgtgggtagtaacagtttttcaccaggttagttattatataggggaagtgatggaagtcttattaaggtaaggagttaacggtggtatagctaaattttgtgagtttttctgttaatgtttagtgtctcatcaatgtcatgtcaaagtcttgaatcacaaaagatcatgtataaatgatatattgcataaatcaaaaacaaaaaaagtattatttcttagacatttaggagaggaggtatagtatttctataaaatatttagcaatgcctcccctctttttaatggtggtttgttgaattacatcaactgtatgttgaaaaagtgggctgcatcctgatgtttctgatgttttttgcttctactcatgattgaacctattggtggatgactaaatgcatggattcattgccaacccctgccttgcttgcctgtccaggattacctgtactatttatgcacgaccttatgtcatttcaaactaacagtattttgtgaaactaagtaaattcatggaaacctctgtagttgagccttaaaaccataattttaagcataccagaatcactcagttctaaattctattaatggatgctcttggaagtctcaaatctttactttttcttttgtaacttttagtgctaagattcaggtgaggggcccttctgtgggaaaataaggatatgctgaaggaagtagtgccattttcatttcccctagagacttctgtcttaatgggctggctttgtcctttttctcctatgcagtttgattcttcgcatttatgacttccctagggcaataatttgcaatgctttgcaaatagtatgctcatttaaatattgataaggaataaatgttcctagtttaagcaatgggcaaagctgcctgtaacctgcaccataaacatatcctcttaaatgaccctgatacaatgcatggttggtgtgctttcctttggttcaatgtacaacgaagagtgttgcacttggggcttggtatataatatatttgaagggaactttcagcctcccttgtatgtgtttaataaacaagaaaagcttcttgaagaattgtaaacttcagtctagtgtggaaaatttggaacatagagtactatcatttttcaaaatccaatagaatcctagaagcatcagtactatgctttaaataacattcatgattgggcacagtggctcacacctgtaatcccagcattttgagaggttgagctgggcagactgtttgagccctggagttcaagaccagtctgagcaacatggtgaagccgtgtttctataaaatacaaaaaaattagccaggcatggtggcatgtacctgtggtcccagctactagagaggctgaggggagaggattggttgaccccagaggttgaggttgtggtgagccatgattgtgacactgcactccaacctgggtgacagggtaagaccctgtctcaaatgaataaatacataaataacattcagtacatttaaaaataacttaaaaagtgtaataggatagtttgtgactcaaaggataaatgcttgagtggatggataccccattctccataatgtgctttttacacattgcatgcttgtatcaaaacatgtaacgtatacacctactacatacccataaaaattaaaaattaaaaaaataaaaataacattcagataatgcaggatagcaaaaaagaagccatacacatttttcatagtgcagtagtttcaatatttaaatgatagaagtgtgtctgttccataaattataaaatgttattgaaaatgaagattctctttaaacaaatcatgcctcatctgagcattcaccttgttagccagtgctctaacaagacacccaattgacaagtcagaagaatagatatccttggattgtgaaatcattttcagcctattgttaaccttactgagtaaattgtaaggggaaatattttagtattttaaaatttaactttgagtaataggtgagtatttaaatatcttctttttttttttcttctaacctccaccagcaattccccataatcctttaccatcttatttccaactctccttggaattcatgccattcttttctctacttgtcacattactctgctatcagagtcctttataaatatctttttaacctttttaatcagactgggtcatactctgtcacccagactgaagtgcagtggtctgatcacagttcattgcagtctcaacttctggggctcaggtgatcctcccacctcagccttctgagtagctgggactgcagatgtacaccaccatgccttgctaatttttttttttttttaatagaaatggggtttttgccattttgcccaggctggtcttgaacttctgggctcaagcaatccacccactttggcttcccagtgctgggattacaggtgtgagccaccacgcccgaccataaaatttgcactataaagcgttttctccaattctgctatcagtattattttttgttcacttaccttatgccaagcactaattggaatgcatttcttatctcacttaatcctcatagcagtcttatctccattttatagaggaagatattgaattacagagaagttaaataaattgcccaaggaaacaggtactaaatgagttatctgaggctttctgattccaaattctacactctttagtacactatacttgcagcctaaaatgagttgtataacccatttgagcttcagttttctcatttgtcagtgagggagcctaatgcctaaccagcaagatgaaaatttggggaaaggaggttgaactatgaaaattatgaattatgaattatgagatggcatttgtaaactatgtagaagttagtaggaattcaataaatgccttttgtcattttcatttttccagttttccaggtcatacctaggaaataagagtcaagaattaggacttatagtagaaaagtcataatgaccaacttactggcagcagctcttcagtgaccttagaaagtgcagattgtttttccccatttctaggcagtttggtcctccttggtagtaatatttgtttatctctagtgtcacaaacagctgtgcttgtttgagtgggacaaccaccatcaagaaaagactcaaggctggcagctgtaactaaatttaattttcacctacatttcacagtttatttatggtgagaagtgtttctatgcaagcattctttcagtgaaccaagaaaaatagtcatatccaggctctgacaaagaacttaaactttgggattttgttagaggtaaaattaaataaggaatttattccttattagaaaataggtagtatccattaatcaacctcttgccacctcctccctccccgctctcccttccctgtgtgcaattattatgtcaattaaaaataacaataaaagcaaaaaaaaagagaaaagacataattattttttaaagttctcttttgagttgcctcacagcacatatacgtattaaattttatattaatgctgttagaaaccctgggaagaaaatattgcatcagatgaaaggcaggtttagaagatagcaaataaagtggtttaatatttataaactttttagagttgaaatcttatgatttcatggcatccacatattttaggtttcagaaaatatacagctgccaggaaaatgaatatcctcttcatgaaggttaccctatttaggcttcttctaaaacatacagtaaaatactccttgggctggtaaaacaactgtatcatcataatctagatagaggctaagaactttttgtgtttcccatctcaactttgtacatgttctttaatgtttgtaagacggaaagaaaagtgataaactcttcatccaagcccatacatcacatccatcttggaaatctaagcttaaagacatgaatataaaaaaattgaaatcaaatttatctgctcagatattgatgtggtcattagaagttctttttacatactttactgccttgctctatttttattttatcacttctcttattcattttgcaattttcgttattctttatcttaactttgtagcaatggcaaaggatacatctacattaatgaatttaaagcttctgaaatgaaagcaaaataagcagacataaatatgcaaaggcctagaatgagaatgtgaaaaaaaatgttatttttcatggattgtaaattggcctggctggagattaggatatatctattaatcggggttgtgagattgctcttgaaatataggaaccggccagctcaagaagggccctctgtgatataattaaggaatttgaactttatattgtagataacaataaatcactgggaaattttttttccattggaagatttttaattaggggaatgatatgattgaatttgtgttttggatagataacacaaattgaaggcgttttaaaccagagattttaataatcagttttaaataattaaggctgtagacccagcgtggtggctcatgcctgtaatcccagcactttgggaggctgaggtggacagatcacttgaggccaggagtttgagaccagcctagccaacacagtgaaaccccatctctactaaaaatagaaaaacttagctgggtgtggtggtgcgcacctgtaattccagctacttgggaggccaaagcatgagaattgcttgaaccgaggaggtggaggttgcagtgagccaagatcgtgctactgcactccagtctgggtgacagagtgagactttgtctcaaaaaaataaaaataaataaataaatacggctttagtggggatatagggaggaaaacataaaagaaaaagtaaactaaaatggaaagacttgaaagagctgtgtggggaaagagaagtaagttgacattaactctctagtttttgctgaacagtattgtaagtctaagatcatgaggaggagaaggtttagtgaacataaataatccattttgaagactttgagttagatgcttgtgaattatccaggggatgttagaaacatatatttggaactcaagggaaaagttagggcagaagccctagattttggtgtgaactccttttttaattttatttttatttttatttatttattttgagacggagtctcactctgttgcccaggctggagtgcagtggcatgatctctgctcactacaagctccacctcctgagttcacaccattctcctgcctcaacctcccgagtagctgggactacaggcgcccgccaccacacctggctaattttttgtatttttagtagatacggggtttcaccgtattagccaggatgatcttgatctcctgacctcattatccacccgccttggcctcccaaagtgctgggattacaggtgtgagccaccgtgagttttaaccgtaaaataatgaatgaggtttttagatggatttcaaagttactgtatgaactgacattttaataatttctttatgatattaaaagcactgattttttctctctgtcttctggattcaagtaactttgaaaaccacatattaacttttaaaagaaaaaaagcattcttaataattctcagaggtcaaatattatttttccattatgaattattcatagttaaatggaagtcaaacatagagacctgcagagagcaagtctttctgtgctgctgagtcatgattgtgactcgaagaaatacctttattgtgtttgattctgagcttgtgataataactagtgtcaaaagatgggaacattctgtaccggaatttgaaaaataccactgaataaaaatgaaagctctgttaacagaattcaccttaaactgtaagctgaccttttaatagaaaagctgctgcaaaccacaaaggtaggctccacggaatgcagccgcagattgagtttgcagagtgtgctggctgattcaatccaatgctaatgggaggacaagtgcaaaggatagtgcctttaaaataaacacagacaattaggaacaacaaatgaaaatcatgataccattgagaaagtgagaggtcatgatccggtgcaagtcattctcaactaacaaactaaaattgcttcaaaattgctttttaactcaactctctcacaccagatggcttataaacaatcatgcacattgttttgggtgatacgattgtttcaagggattgataccagaatttggtttcactatatctttatcttaacaattctatgtagtatttttaactcttagagtctgtatgtaataaaaattcttttcttcaccaaattggtgagtttgtatgtgccaaaatatttttgttaaataagagaacacacttataatcaaaaccaatgtacaaagctatgacagttacatctactggagaataatgtgttgttctcactgaactcctttttgctaaaacttctccatttatgaaattcgttactattgtgcagcatctatatattaaacaatgaactccacatctgcaaactttaaatcatctattaactttaaaacatctattagcaaaaattgtcccactgggggcaataggaatcgagtctaccagttttgttcttagtttttgagtttatatttctcttacacctcttcactaataattaaatgcagtatcaacatggttttgaagtttaagctatccaagccatttgtaggttggcacttctttttttttttttttccctcccccctcccccctccccaccacagtccccagagtgtgatattccccttcctgtgtccatgtgatctcattgttcaattcccacctatgagtgagaatatgcggtgtttggttttttgttcttgcgatagtttactgagaatgatggtttccaatttcatccatgtccctacaaaggacatgaactcatcattttttatggctgcatagtattccatggtgtatatgtgccacattttcttaatccagtctatcattgttggacatttgggttgctattgtgaataatgccgcaataaacatacgtgtgcatgtgtgtctttatagcagcatgatttatagtcatttgggtatatacccagtaatgggattcttagacctttcatactcacctatctgttttgcctgccatcattccttcgctttaataaggtcatttctgacctggttgaaaaggaatataagccgtgttaattttcagggtttaccaatgttgactatctataccttctacctacagtggagaagcggtgataaataggagtaacagttacccaagtttccagctcaggtgtctgttacactctcactacttcagcagagtgttaaaaaaaacccatattttagaaatgctactttacaattgaataaataatactattacagaatatgtataaatataagatacttttatctaccattgaagttggtgaatccaacagtcatttcatagtaggtctacccaaaagctttcaaggaaataaatgcttttatatattatcatacgtgtaaaactactccatgcatagatctagcttaaaataaattccaaatgaggaagtatatttacttaatattaccttaaatttgccttattatttaaggtaaatattaccttaaaaaatgagaataatgcattttcatttcccccttaatctttcgttttcacattgttactctctcctgttactactagaattaagaggcctcagaattgtgtgtgtgtatgtgtgtgtgtgtgtataaagtgatgaaaactacattttatctactcaatgcatatttgttatgcacctaatatatgacaggcatttcttctaggtgttttggataaaaatccctaccctcatagggcttcaattctagcactcatggttaggggtggagagggaggcaataaagaattaacataatcaataagcaaattacgttaaaaataggacagagtgagagagcttggggtatgaagagtgggataggtgaaattttaaataaagtggtcagaatgaggcctacctcactgagaaaatgacatttgagtcaatatttgaaggcgatatgaagagctcaaaggcattttaacagagcttatttttctttgcattttctctcgctttggtttctagcttagtagaggagggaaataggaagtatggatcagagttaatgctataaagctttgcattatctacaagtaggaaaatattacattttttttcctgcaattctaagggacaagaacaaactatgctgcagataaaaactaggttttaagatcttttctctgccacttgctggcttggggattgtaggcacgttttttaaagtctgtgagtcttagcttactcgtctaaaagtggaataatcttgggtgacattaaatgaaattatgcatattaagcacttagcacagtgagagacataataaccactcaataaacattgactattaatttttatttaatattttagtctttttttttggaaaatgtagaattcttcatagcctaccaaatgggactttctctctaatgagaaatatctagaatactctataatggtaccttttttctcaagatggtgaaaggaataaaatgtgtgattcagaattctttggctagatttattattaggcaattattgagcaagataaggtaagactattaccagttcctgaatctgagtacctatgataaactgtgttcaaccgttctgcttttaattggagtattagtgaactattttattttttcaagttggtaaatagcctgcagtgattaccattcacttggttttgtattaagaggtataaatatcttaaatacaatagaaaatttccagatctctgcgattttatgagatagtagaagatttgtaggagaatgttagaaaatgaatctgtataaactttaatgtaaacttctttaaagtgatttttttgttgttgtttgctagaagattgactttcatcacttctttcattccttcagagtggcatagataaggtaaccataaaattaattagccgaactaggacactcttgagaataaacagaaacaatattactaattctgttgggacaataggtataaactaggactatcatgggcaaatggggatatatacagtcatggaccaatagggcctctttttttcaccaatacataaaggatcaatcaccagtagcttagagatgagcagtttttaaaaagtctgagataatttttacctctgggataattttaggagacaagacaaaattaccttacttggaggcaggccaagagaacaggattcttacccttgttgttttattttcattttaataagcattacagagtttctcatgaatgacagtgattgcaaaattgattgaaagctcattttaattcagacttctccatacaatattttttctttagtttacttcttccagtccttttgctctgtttcttgtatttgtatacatctcagtaaacaagcctttatttgccttggcaagctctaggtattttattcattaagtgaacaggccggtttcttttctaacagactggtggttaccatttcaaacagctccctttggtctattttggtcttattgtgactctctgagccaacatttccaaagttttcaccagcaaatatgtaggaagaacaatgaattttggtggggagttgaggagaaatgggaaaaattttggcaagcttgcttttctgtcttcttatctgtttggcaaattcctgggctgagcctcaacactaaatttctctccctgcacatggacaaacactgagagaaagacaaatgtgggaaaagggagaagtagaaaaagcagaggtaaaaatgcaatgcctgggattttcagaatgccgacaaatatgtgggtatctattcagcttccaaaaattatgcatcttctctgattcccaatgcaaaaatgtgcacatgatttctttgatctcaaatgggtattattcccaatatcgtattaaagtcccaatttttgaaatgggaaaacgaaaccaatttaagtagtgcatcagatgccacttaaatgttaaggtgggtccaccctttataaaatgagagaattggtcaaacataggctacagcggggtgcggcgaggcaacagagccgttaaaaagcgtgtggaattctatgctgaattcttcaagttctgacttcattcatgggactactttcttttatatagatagtgattccagaaataatgtcccataatagtatttcagaggtgctcttgggcacaatagctctagatagtggagattaggtagatatttggggtcttacttcacgggcgtgttatatgagaacctttgcatcatccattttgcttctaatcacgttttccatttctggtgtgtgcttccctcataaccctgtttttatatcataacgtttgctgtatcagcacccattctctttccactgctcagttttaaatagcttcattatgaaaaatatagtacttaaaaacatggcacaaatgtgtattacttcagcacaagataaagagattactgagaagtgcactgactgctgaagtaactttatcctaagggatatttcgctactttaattgattttttctgtccattttattaagagtccttggagaaggtaaatggtaggttacctcctggaaacaaaggaacatttgacgtatttgttatgactaccagtgtgtccatacttttgtaaagttaaacatttttttcatcatcatttcaaaattacttatactgatgaataaaaagatgaggatcagttagttccaaccctagatagggtgtacttgaattttaaatatcttgtgctatttcagagaattaatctacgttttacttatttatgctagttaataaattgtagttttgacaaaactagggattacaatttattgtatcaattactattaaaacattttaagacacttttttattttagcttcacaaagccatcctaggcaaaactgcatgacactgtcgaaggtctttaagtggcgtctctcactgctcttagttataaaagtttagatgaatgaatactcttataaatcaaaaaagcttataaagtacccaggctgtgtcaccaaatcccatagttggtgtgggctctgaattgtgatattcatacaagttcaggaatagttaagttccaacattatcactcccacctgaaattaggatactgtaaaaaaaattatgatgctacacaatatgtttataaatctctgttttagtctatcaacatcgttgttttccatcattctctccacttatacttcaagtagtaatgtgtacaaattaggttaacggatgctttcaaacaaaatttagtttaaatttgtttattctctttataaacaaagataaacaaaataaaaaggatgaaactatgagactttcatgagcctctttaaataacctagctctgtatctgggtgaaagtgacctacatccactggaccatagaacccatccctcagtgggtcctggggcaggtatttctcactgagcatccctaatactcctagcccaggtgctacagatgaatctgatgcactaggattcttttacatcaatgttggctctctcttacaaaatgttttctcttcttgtagctttcaaaacgttctattcacatagatctcagaagattctgaagggagcgcaacttccctgttagcgtctttctgaagctatatggatttcattaaaaataaaaataaaaataaaaaagtagggagtggaattcagattgttttacttaattgtcttctctcaaaaaagaggaaaaatagagataaattaattactcctctttttagaatagtaggagttatctatatataaaaacaaagcaatttaatgttggcttggtcatttaacttaaatacaattgaaatgagaataaacaaaatgaaacaaactgctttaattgaacctaggtggctggatatcatgccttctcttacatttttacatttccagtagtagaagatgtcttattttgagaagctaaattgatcaaggtctatcatttgaacaagttcctcttctataataacaaaaaaaatttaggtagttctaactctagctatgatctacttgatttttaagtataattttctatttgggaatattcaacatcagttttagtcatctacagccattttttgacaagaatggagattgcaacttattttatgaaaatttactattaaaacattttcttagtttaactttttctgctttttacattaaaaacaaaaatcgaaacacttatttttttatgtttatgcaggccccatgcattttagctaatacttacttttgacaatatctaacatgttggagtcaaattattttgctattggggagaacaatactctcatttttaccatgaattgttgctttattgtttgtattccatggcaatgttatacattttgaagaaataaatattctcttcctttgtcaataagagatccacttcatttattcccatttagttgtcttctctttgtcaggatttagactaacgagaaaatcttagaaagatcctttactgtctaaacaccaagcacgcaaatgcttctcaatagaaataacacaagaaatgcgttcaaagacaatacctagcctgagaaattcttgtgtgctgacagctctccaacagtgttgtcacagcaggaagacatcagttgaagaaacagatagtgacctcaaaaaaaagtctggtcagcagtgtggacagggtttcacaagattataaatcaccccagggtcgctctgttcccaccataaagagagcatggtcgttttattgtaatctaataagagatgggagcaaaggacagctccagtgtgtgtttgcaaaaaaaattcttgattacagtttcaaaactatacagtttccctgctattgaagtgcagattataggggttaaggccatgttaggattggattacctttttatagctgtatgttatccctcggttcatgaatcagaaagtacttaaattaaactgaacatttgggagcaatcccagtatgtagcatggtggtagaaaattaatcatgattttgtgatagattattaagctgttcatttgaagggggtctttcatagaatcagaagattaactctctggtgggtatatagtagtacagaaaaaagcccaccctatatatcacaagttatgttaggactcattttagaggggaatgatttaatgaaagacaacatgcatttatataaaaatgtgtatgagatcaaaacatcactagcagattttcagtttctcggaccttactatttttttttaacttgtatttattagtttctatgtttatttttatataatactatttaacttaaaccatgtggttactaaatattttaaatggggcattttaacatgagaaaaactaacaattccatattcgaaatatttaggaataaaaaaattactccagttagattaagagttactgaggaaatagtagccacaattttgaaggaaaactctaaatgtgatgacattttaaaatagcacatgcctcttcatttgccctagaagcacttcatgtggtggcgaaaaggctttaactttattcagtcattttatcgtttgtacttaagcttcttcaacactatttgatctatatacatttctgggaccataatcaggcatcctaccatttaactagattttattccctaacatattgcctttgctttgtcagtttgttcctctggaaccatgctgacatctcaagataagtcctatcagtcttgggctattgactgaatttgattgtgaagaagccatcacttagagtagagagaaacagggtgaggtgttattgctaagaatatactttatgttatggttctaaaatccaaaagtaaataagatgggattggcagctcttccttttttattaggcataagatagattttgagagctctttttgtcttgtcttcttttcccttcaggagtcacaaacctggtagttttgctctcatttactttcttgagcagagatgaacgtgaaagggaattctggctctcgaaggatattagactggtcggttaaacatagtgggtctttaattcatctcagtttattttccacttgtcaatttctctttgtctcttcctcatttatatatgcttaagtaggtgagtagacagatttcactgtttctctttgccttagactttctctagtgctgctaaaagcactacgacaggaactggaaactggaaatgatcaatatccagacaagttctattattttttgaatatagaaaacatttgtgacttctacaacttccgttggctgaaagaacaaaagctctgggtgtcactgcaacttcaagctgcaaatgaccagaacaatagtactcaatttcttattctaatttacgctaacttgattctgtttcctattggctatcataagaattttgcctatataaataagataaatttgattgcaacctctcagatattttctgaatctgttagtgttgtaggtgtgtttcgtattcttaacttttttactacttatgttagtaaaagataaatgaatatatctacttaaaatatttggtgattttaagaaagtaagctattctgatttcctataagtagaaaacatatcattgatcatttatagtggaactactcctctatttttacactctccctaggtaaagcatacaaattaattcacagcaaccaccatctaacactggaatttctcctaaggctaagacttgtgcacaaccatctgttttacatatgcatttttttcttggtaatctttattactagatggtctcaaatagaaagtacataagtgcaaatgccaacatgtatttttgttagtggtgctgaatagactggttaaggtagacaaacaaatgtacttactttgatttatcacttctgacattagcatgtaccatactgctctccgggaagcaaaatggttgcacctgaggacagtgatataaacactactttgattatttgaaacaaaccattaggctttgatgaaagaactattaccatggtggatcctttgcaggaagagaatgcttggagataatggatgagcagcctaaaattacttgtttagaatttaaagaagtcaaagcctaggtttgaggaggaaataagtatataaagcaaatttaattttgtataaatttatacagttgaatttttattcccagtacgtacttagttgcagtgactttcttgttttagatgaaatttatccaaattagacaaacttattctaaagtcaaattaattgtgtttgaaaattaagtccaaagtcattctattctatttttcaaaaataatttcctaagatcaggattttatttatttgcatctagaaactaccatatgttttgtcttacatttaaacacacacacaaaaccaagcccgatgatgacttcaatacatatttatcttatgtgatttgtagatggagattatacttggtcaaagcatgtatataaaatagaaccacaaactattaaaacttccccagtctaaagaaattttatttaaaaggtacaatttaaactaaaatatttaagtttttgaagaggttaatgcttttaactttcttacgttagtacataaatgtgaactgaatgtcagattagacaactttactcagtattgaaaagaaaactactggtcttcagataacaggatttaagtgaatttttgtgggaggggagtgaggaggaagaaagtagaaagggggtttagtgagtacaagcatggcaacagtataagcataaggcaacagccgtagtgatgtctggataaggaacaccagaaatgaacctgaaagactgggggccttagagaccagagaagccaggatggaagtgaggaagagtgggttactcaaagatgggaaccagcaggctaaaaggaaagatcaaaccacagaggcaccatgtaatgaagacaaactcagggtttttcttaactttgccttgagcctaccctaaagtctgtgaaaaacaaagaacattttaaatagtctgtcttattaaaatgatttgctttagagatggcacattatgcttacgctaatgtttcatggttgaatacatgcttttgtgctacaaaccgtggtttatagtttagaaaatataaaagttgaaaaagatgtttaagaacattattttttattaccctactttatatttggatgtcgatggcacgggtgtaactggcttaattcaccaatgaagaaatgtaggtttcacagaggttaaagaactcacttaaggtcaggaacagtaagctgtggagagagaagcagacacagatcttatcactctgtcccgagcctttccgttaccctgtaacgcagcttaacacttttgaaagattgtggtttcctgatcctcagagttcaagtcttcctcagaagagtttagcacagaaaacagtgcaaaaaataaatgtccctatgtgatttcattttcagtatatttcaagctaatttatatataaatcttgttcacagaggagcggaaaggtggcttctgtttagtagcattaaaggcaatcaatttgtgttgcagatattgacacagcacctgaatttacatagctctggtgcaggacctcttctttacttagttaatcaaaagctatcagaagaattataaatttacagataacctcaggtaaataggaaatgattttatgtgattaatagcactattctttgttattgtccactacacaatgcagttgctctgaaattcagtcgctggttttcaaaaaaggagcccaggcgcttgccttaatgaaggatttgctatttaatctttgccttaaaattgtgaatataggaaatcctaatcagctatatatttatgactttttctcctattcttttctcacttcttcaactggcatgcacagtctgaagttttattattagtgacataaattaaattgtaaatgtttaaagggcactgtcacattgaaggtgaatccaatgtttttataaacttaataaggagcgttctatcaatgaccttattcttctgtagtacgttgacaatcttttgatgtagtcctcactcccttgttctcagctcattctctgggtctgctggcgcttctgctattatggaatcatttgctggttgaatgaatgttttctcaagtttggaacttactgtgcaacccaaagatgccttaccaattaggttgcacgtttattttgttttttgccatcttggcattgaaggctatattcttcaaattaatgaaggccatgttgtaataattagttttaagtttctgcagccaatacgttatataacaggaggtgatctagttcacggagttgtaagtcagtaggttggcgattcagccccgcctgcatccctggaaacaatgattgtaatattgccttcttagatattggtaaggtggaactagtaagctgtgtttagaggcataaaaatggatttgcatgctggagtttggactctaaggcagcaaagtccagctttttctcttctactctatttctttattttccatcaaaaatcatttcacatttagattatcaaagtgagtctagaatgttagaatccactatcaagataataataatactcccactctcctggatgttcttaatcctcatcctagtggaatttgaatgtcttaggaaaatcctgtacatacgtaattgtaaagctttcggaagactttggttcaggattactgatgcttccctattccagctaatagtaaatgaagattcacgcaattaaccccagttgagcagtcaacagtttgtgagtactttcttggtcaggcactcttctggttgctgaagagaaaatggttaagaaagtggcaatttctgagtcctcaaggatctacttcggaatatacatatataaagatgtaagtgaaataaaatatattaaatgcccttttatatgtgtaggtatgcatatacatatataataggcatcattatatataattaatcatattttattttacttgtatctttatgtatacacaactacatgcccttatggcagcagaggtagtggtggcaaaacaaacctcagtgggatggcatggacaagtaggggaatgggagaagagacaggttatagatgttcctaggaatgccatctagaggaggaccaaagggagaaggtaccagctggccacgtgagaaatcatgatcacagccttgctcataagaaatggttttgtgtagcctggaaaactgcaaccattttgaggtagagtactgggagaaaattcttgaaaagtaggaaagacttagatcaaaggaagtttcttttatttgtttattgttgaactgatttaatttagaatcattaaaaagaaacctaaaattcagtgcttatcaaaatagcaatatgtcatacagaatcaggattaggaaaagaaatgataaagttggcaaatatgttttattttgatatgtatatactatatgcaacacaattttgttgctgtaaaatgtaacttttaatgggaagcagtcaaatggatatttgaatacacatttttaatttccagtttttaagatgcaaaatttggaatcaggattgatatgccaaaggcagtggactcagggtgtgaattctttccatctctttagctttacatgtgcatggatacagctgtttgcatggttgccagatgttagactaggggcttcaggaatatattccatgtattggctccttcccagaagcaaaatattatagattctaataatgttcttgaaatataaatacaagttgtctttatttttagacttttttaggtgtcaatcagaaacatattgaataaatatatgtctacctaaaacctggtacacaagtgttcatagcaccattattcataatagcccaaacaaaataacaagccaaatgtccatcagctgatgaatagataaataaaatgtggcgtatctatccaatgtgtattactcggtattaataagaaataaagtgctgatacatggtacaacatgggtgaaccttgaaaacattgcgctaagtgaaagaagccagccacaaaagaccacagctacatgattccatttgtagaaattgaccagaataggcaaaattactcacacctaaagtaatgattgcctaggtctagggattggggtggaaagtgacacttaataagtatgtggtttcttttaaggggaacaaacatattataaaattgaacttggtaatatatagccctgtaaatatactaacatcattgaattgcatactgtaaattagtgaatgtatgataggtgaattatttatcaataaatctgtgaaaaggaagtatattaaatagcttggataaaggagtgagttaaataatgcaaaattatcacctgtgcagtttattttttataaaattcttaagtaaaatatgaggactaaattagtaaatgaaagagaaaactaaatatgaagcacataagacatttaagagcatcttttttgttatttcgtttgaaatatgtttaaacctttaatccatcaattttggtatgtgtgaaaattaataaattaatagctctcttaccttccaagtcaatcagtgatgattttcccatttctttctcctgtgggggcctccttaagacttcattatttgggtcattctttgaatttaatggcatgtttttttccaattatgaaaataaattttaagcaacagtattaaaattcccatgtttatgaaatgtataaatagtaatatcctcagctttaaattgctcaagtcaatgattgtgtttggacagagcttccactttattgactttatgagaggaaaaaacagaaatattttaggacaaattcctccattgtgtaaactactccctgagagtagtaaggagtgagaataactcttttgatgaagtagtaattgaaataataccctggggacgagaaagagttattttccaaagcagaagaaatgatgtggagaattgtagctttagccaaaagaaaaactctagttgcagacctaggaaaaattaaatatcatcccttccctctctcactcattcattcatttatttttcattcattctgaacatactcattgagtccctgccatgtgctgggtgattattactcatgcatattactctggcaagaatgtttctttttcttacttatcatgtttatgtgacattcagcaattaatggggcattttttcagagtattagggaaagttcctctccatctcttccttaatttcagtctgtcaacttgtttaaggacatatgttgccttattttatttttttcattttctgagtacttatttgatgttgaatataactgagtccctcctgactcatcttttaaataataataataccaataataatataaaatgttcatagttattacgtagatcaaatttagtgattaatgtgtagagtttaaatcttggctcattgtagacagcaagtgacaactctgttgaagagtctcaacgtaggtaacacatattctatattattttttaaattgaatataatataattgtattagttcttttattacatggcatgtggcaagaggtttgaagaattgtgaactattccatatagaaaaacattagtaagctatttctccttgatatccagtaaattaacagaatttacataacaaaatttggcaagtgtttgatataatttctgataaatacttagccttgtattttgagtgggggaagtgtatttcaataattatgcattatttttgcagatagtaaaacgtcaagacaaatagccttcttttgtttactgatttgaaatactttcatatgatcatttatcatttaacagtgcttatcttataacgaggttgtcattgaaataattttggtttgttttttttcaactttatgataacttggcttgaaatgccttttcaaacaatcaagaaacagataaattttatctacaattgctttcttttagccttatgtttaatgctacctttggctatctgtgatatatgctaaatgactttctcgcctgttccatattttagatacaggtttaacatccagaagtacttcattatatgatgatttggattgtaataccagaaataaaaggaaatgtatttctcagtgcatcagtgaaaaagtttaaataagttaatcacttgtctttatgaggcctttcatttcatagctcgatagctctctaaagttccattgtcattttttagtatcattatgtgcatgcatctagaaacaggaggtttagctaagagatgaaatccttttaatttccactctgaacacattgaccctttcctttgtcttaataatagaataactctgattgctggatatttttaacggaaacaaaagattgaataattttgctgtcttatctttacagcttgcaaaagggggcattttaatgaaagggttgcttttgtttattatgaataactatggaataggaaaaaataattttttgaatattttattttttaatttatgaacacagttaatcatactcatctttatagaaaataatgagtcagggcatgccaccgcttttgtgttggtgctgtgttattttacaggatatagtccctcaaaggtacattttctgttgaattttaatagctgtgaagccctaagttcaaatctatgtaaatacatttttctttattctttactaataatacgttattttcagattatgatttttttcattgtggagaactgttaaattattaataataaaagcgagagatgttttgtttcttgttttgtgtttctttagttctctccctctttcctttggtatcatataaggtcctagtgaactattagccacttgctccagcatggagattttgaaaaacccttacgttttaaccttccccttaaactatggtgtctaaagtgacaggttaatttcaaattcaggtttgattgagtatatgccactttttacatgctttccaaaactaaaatagagctgtctttagaaatttttgtattaggaaaattaacgctaatcgaggaaagtttgctttagttaattccctttccacattcattgcaacttttgggaaacatgcagtgtgttcaacataataacatacacgagatacacaagaatgatgagagcccagcagcaagtgcatctaaggaatgctcatcttgcacttttgcttaatttaagaaatgtattaggaaggaatctaagaaaataaagacatacttcattttacttttactatattaaaggtggcacaggtgttaatccatgtaatattttgcaagatcttattttgaacttttgtgagtatctctgttcactacaaatatagtggaaatcacatttccttttcaattatattattaacttatttaaaatgggatagtttaatacatgacactaaaagactcataagcacatttagaactagatttcattgaaattgtatgtgtgtgtgtggtttatgtggatgtatttatatataattttgctggtttcagtgtctttgtcttttcttttcttttttttgatggaatctcgctctgttgccaggctggagtgcagaggtgcgatctcggttcactgcaacctctgcctttcgggttcaagcaattctcctgcctcagcctcccgagtagctgggactacaggcacacaccgccacgcccagataatttttgtatttttagtagagacagggtttcaccatgttgtccaggatggtctcgatcttttgaccttgtgatccgcctgcctcagcttcccaaagtgctgggattgctggtttcagttttaaggaagaatgtgaagtagataatactgcagtcgtttaatagttatcagtagggaattattaaagagactgtggatatcttaaatgctttatgatgatggcatacaggagcaaaaatgaaaattgtatattgttttaacttaaaaaatagaactgtactctcatcatctaaatgcatagacctataaagaaaatatataactaatgtaggcattaggcattcctaacttataggtgtagaaattaaaaactgaatattttgaagaaaacagatgttgcctacattaaggggaaaattttaaatttaaaatcttagaatttaaatttaaatttaaaatcttagaatttaaatttaaatttaaatttaaaatcttagaataatcaagctgagaagggacctcaggatcgtgcactccacccaatttgcagatgagagaactgaggcacacaggagggactttgaaaacctaaaggagaggaaaactgtgtagtagttggatcatgggtggaagtggatagagtaagtcatttttcaaccctagtaaagcagaaaagaatattaacactaagtcagttaaaaggaactaagcaccatgtaagaggattcacctactaaaaccaatgttcacaaatgggagaagtaggcaagccctgttgaatgcggctatcattccagatacttcaatcaggagtctatagagtatacctcctaccatgtccacttatgaacttttccggttagtcctggctttctcatgctgcaaccactttgcagtacagctagctgtcttattggcctctgtttttgtctagagctctgctatttagataggtaaggttgtactttgggttttttgtttttgtttgagatatgattgagggtgtgatgaggtcataagaagagaattacgaaatatctttctccttcccattttgttctctgttttggttgttccagtctaatatacctctccttccacttttgtagaacagcttttagaagatgaatgacaatcctatcctttctccgtggaagtcatactaagaaagtggtttattacaaaagatttctaatgctctttctacatgaatgtggatttataactgtatgttgtttcttcttgtgattatttttattagacttacatttccaaaaatatatattaatattttaatttgacatataccgaattctgtttttttaactcatgatttaatgcattagtctaaagcaaagccatccaaagaatattatgtgaaacttaaaagttaaaacttcaaaacctctaatgcattccttagcacttggaatagattcaaacttcctaccatactctacaaagccctggtcaaggctttagatagactctgtggcatctttggaaattggaaaagtcatctcatgagcaatcacatctccttggttgcagaagggtgctgctactgtctttggatgcagaagaccatgcctgtccttgtttggatactaggataatggtatggtgatactaagataaggggctggacttccttgaaaccccttggcagacccagccaatctctcgggcagtgcagtagatgcactggactgtctggtatttctctttcttccatagaaactgtgccccttcatatcattctgtgattaatttcggcccctattctttttttttttttttttttttttcggtagaggcaggatctccctatgttgccgaagctggtctcaaactcctgggctcaagtgattctcccacttcggcctctcagagtagtgggattacaggagtgagccactgcacccaatacagtccttttctttaggtgccagttaaatgaaatggagccatttctggtccattctagctaatgtcatccacatcttctcccccgagtaccctttgtcacattgtgttatatttttgtttgagtccttgtcaatatctgaaattatcttacttggtttcttagttttaccttttcctcatttgtgcatgaattcttttgaacaaggactttgttttttcactagtggatacttagtgctaagaataagaattaatttctttgttagaaattaatgttccttgaatgatgaaacagagcctttacaccttcaatttgctctttttctgtcagtagtggagaatggaatgtgtacattcttattatattattgctggtggaaggaaacattggtagagacaaagtcatgacctctaatcctttcttacacccactagaaaaataccatgtgataccatgaccatgaaatagacttccagctacagactgtcaatcccagaccaggaccacataaaatgaaaggagagaggctccaatgacactctattaagttccatgctggatattttccatatgcccttccagatccacactgcgtctttgcccctcggctttgctctctgggagccagatttttatggactgccttcttggcctaccttaccctgtagcttctggatgtgttcattctatgcaaagtgccagctggatatcaggaggagagaagtaggggagagtgaggtcaggacatttaattctcttccttccttcctgctgccttaatgagcagtggcttcatccctcttccaaaatacacagttcttgcagggagactttcctatagcttcagctccatgttccaattgcagcaactggttgatctcctctcccttttaggcctcccacacctggcagccccaggatgccaccttctcttttattggtttacttcaattctgctgatactttagcgaatactccctacatcatctaactctctccagttaataacatctgaggggcttgtgttctctatagagaccttgatggattcaggtcccttcctgggagtttcatgattagcaaagatgtatttaggaaactagaatgagaatctaaactgaaaatgtgctttgggaacttgctatatattgatagacacagaatagcatccaagtcaaaactaagcttctttattgtccacactccaaaggagaatccactttcaactaatgcctgtatttactttacctttttgtttgtttgctaactggaagataaaaatatgtttagaaatttagtggtgaatattagctacgatccatgcctaacctggaggatggactgggcagtgcaagagtagagacaagatgaccaaataggaagtggcttccttgaagaggcaagttatgatggtgatttggacaagggtcacagccccggagatgataattaacaacctacagtgacttctcacaacaaccaaagtaaatccaaagtctttattgggactttcagggcttgcatggcctgtcctttactgtcttctccaaattcacctaccatcaagctgcatccgtaataacctattctctggtgttgcattcactgagctcatttgtctgttttttcattatgcaaatctcctcttacctcttcagagtgaccttcacagacaacctagtgaaagcacacttgcacccagcatactttctatcaggccaccctgttttccctaattatagcatatatttcttttattttcttgtttcttattgccaaacattctagttccttgaaggcaggactccactggtctgttctagcactgttcaatagaaatattgtgtgagacataaatgtactttgaaaatggctgggtgcggtggctcacacctgtaatcccagcactttgggaggccgaggcaggtggatcacttgaggtcaggagtttgagaccagtctggccagcatggtgaaaccccatctctacaaaaatacaaaattagtggggcatcatggcgggtggctgtaatcccagctacttggtaggctgagggaggagaatcacttgaacctgggaggcagaggttgcagtgagccgagatcatgccagtgcactccagcctgggtgacagagcgagaccctgtctcaaaaaaaaaaaaaaaaaaggaagaaagaaagaaagaaagaaaatatttagtagccacactaagaatgttaaaagaaacaggtgagattaattttaatcatatattttatttccttaataccttaaaaatattattatcttaagatgtagtcaatataaacaaatattcaatgagatgttttactttcttttccataggaaatctttgaagttcaatgtgtcatttacactgatagcatgtgccacccagacatttcaagaagtcacatttcaggtgctcactagctacatgtgactagctgttgcgacattgttgagtgcaggcctagttccctggtgtgtccctagaactaccaacacctagagaagggtttgccattttctaagagaacaataagtattcaataactaatacatcaactggcaggatcacattgtatcttgacatcttggtgtgtggagctgtaatgatggcaaagagaaccagagtgttgtacttgtaacagcactctacacaacttacagtcctgggagctggcatatgggccatccacaactctatgacttggacagttccactgatctgtgccatggtttgtccaatctgtggagtgataaggttgaactatttgatcttcaatgtcatttccagttctaacattatatatttcctttctcctttatatgtcttatttttaataattttgttttactttattcattcataatttttgtagacgtatgcttccatttctctttttaaaaaacttttattctaaattcaggggtacaagcgtaggtttcctacacaggtaaacttgtgtcatgggggtttgttgtacaggttatttcatcacccagtcatcaagcctagtacccattagttgttcttcctgatcctctacctcctcccaccctccacccactaaaagacctgagtgtgttgtttccctctatgtgtccatgtgttctcatcatttagctcccacttataagtgagaacatgtggtatttggttttcttttcctttgtgagtttgctaaggacaatggcctccatctccatccaggctcctgcaaaggacgtgatctgttcttttttatggctgcatagtattctatggtgtgtgtatatatatatatgtgtatatatatatgtgtgtatatatatacacgtgtatatatatacacacatatgtgtgtgtatatatacacgtgtatatatatacacacatatgtgtgtatatatatacgtgtatatatatacacacatatatgtatataccacataccacattttctttatctagtatatcattgatggacatttaggttgattccatgtatttgctattgtgactagtgcagcactgaacacgcacatgcatgtgtctttataataggatgatttatatatattcccagtaatgggattgctgggtcaaatggtatatcttctcttttatttttcttcacatattacaatcttgcctttccccaagaagtagagtccaggcaaaaatgggataaagggtcacatgcccctgatctaacagcttctccttatatctgtcacatttagcaagatagtgccatttccaaagaaacccctgactgtgtttctgttgcaagtacattgtattatattttcctctttgattgtttagctgttttaaaaattttgttaattttaagacaatcttagttttggttaatctgagcttattttattttattttatttttttttggagacggagtctcgctctgtcgcccaggctggagtgcagtggcgcgatctcggctcactgcaagctccgcctcccgggttcatgccattctcctgcctcagcctcccgagtagctgggactacaggcgcccgctaccacgcccggctaattttttgtatttttagtagagacggggtttcaccgtgttagccaggatggtctcgatctcctgacctcgtgatccgcccgcctcggcctcccaaagtgctgggattacaggcgtgagccaccgcgcccggcctctgagcttattttaagacctgacaaaaatgttaaccttcttttatgttgacatagtctgtagttcaaggttatgcatgttgagcattcagtattatacctgtcacgtgaaattttgcttatatcatttattgagttttaattacttgggaaattgttaaactgttttcctaaaaaaggacttgaaaaatcactcaaatcagtgttccaaaaacagttcatatattccttatcactctactcttcaatacctttttcaattattttaaattctgaaatgcccagttgtctttctttttataaatggctttaaatgctattaccaccttgtttgaaaatgtgttatttcacagtctgcatctatatgtaagaaaaagtgcttcaccaagttaagaaacagtgttattttaggcaatggtaataatgaataacactgtgcttgacgcctggctctcgctcagctactccccccgcccacccccttttttaagaacaacatgaatactttcaaacccacacctagaaaacagtctgtggtggtttttacttgggcagctttgtttgctccaaggaatatttggacattagcataaaggttgcacatgttatacaaagtgtaattaaagaagctttgatccccaaatgtcaactagcttgctaagtgtcataacaaagtgtcaagcatctggtatacagttaatttgtagtcattaactccatattgttgatgtgacagtttgttagcaaagcaagcttgacggttgcattttgttcttgattgacacctacagacctccccacccgtttagtttacattcctgttgaggtttcctcaggttgcatttttactgcttaatttcccccaacttgttagttgaagtgctggcaaacttttaaaatcatatgctatgttagtacagaatttcaaactccttctctaaaatgttctaagtttgcaataatgctggaaatgaaaaaaagcttcatgatctttcttcagaatttaaagatttcttcaagtaatgtgacaacacatgcattatcctgatgcataattgtcacaaataacatatttataagacgacaattgctatggcaattaatctagtcaacagtaatttcttgtacagttccattaatatttccacttttcaaaggctcagaaaacagataactggatacttcatcatattcttaattgcattgatttaatccaaagagtccattacaatctaatttcagtcctttaatgctttaaaattttagttgtattaaattatctgcaacttgtttggtgccaggtttttaccactgttattaatagaatcccatttaaaaatgttttataagatacttgattttttaaaatattatctctttataccgatgttacaactatacatgcagcatattactttagtaaattatgtgaaggaagaattaagtatattttcacaaagtattctaagtaaatggatgtaaacaatttatacttatttaattcttataggttgggttggttatgtagctaagctaagaaacatgcataatttataaacttgtacaaaattgtggcagcaaccagaaagtttcattcactaaaggtcattcttaaaaactgcccatttggacaaaccagactttatagacaagcacaatgaaactgctgatggaaagtttttacgtttttatttggttaatctagcttactttctgccaacagataaggccagtcactacatttgttgacaggctcataatcaatttgtttgattacttacattaattttatcctttgccctcaaataattattccgagactacaacatcactgtggagacactccttggcttgagggcttaacgtcaccatttaagccatcattttgcccccaaattggcatttcacattggatagatatcttcatctctttaggctttgggtctcttgatccataaaatgaggtcactactaatgtcttattttttttctaactctaaaaattatgattttgcatgttactttacattattattgaaaaatggcaatccctttaaatattgatatgacatgcctcatagaacttgtgcttttgagtcttgtatatattcgcctaggtgaacactagtctatttattagatgacttgcatgagaactagtcaaatgagatcatattataggtttgttcttaaacctattctgtgctatgattgctttattttcccagttgtactgtctttgagctggaggaggagaatacatcctccctcagaatgaagaaaggcaacctcattagtggaaatataggtaggcatctgtggatggagttgataacgcaagtctagatgttagaggagttatgggaactgcagcttgagtctgaactcttgggtctgactcacctgcattgatcactagctcgatcacatcctaagaacttgggcaagtgactcaacacatagggccctctggtttctttatcctaaacatagaatagtatctaacttgcaagactttgtgatactaaataattttatgattatgggtaaaatgtctgactcttagtgagagctctataaataatagttctaactactaaaatagtaaacttgggttactttaaagttcaatttaatctcttcttctctgtgaaagaaaaataacatagtaggtactcagttaatatttttcaatgaataaagtccattatatttgttagaccattgttaatatgtttaagatgctagacatatcagaaaagattttagtataagccatgcatgaaacctattggaagaagaatgacttaggcagtgatggtatgaaagggcagtgatgacttttcacatcttgcaaaaagctgggcttggggcagacccaagcaatttgaggctgcctgactgtgctgttatttagcacttaaacttatatggaattgtgacttaaataccagtcacagtttaggagatgtagatatttgaaatataaatttggtcatgggggtcaggataagtgcatttgaggttttttcctttttttccgtgggacacaacattagcctcttcttattaagaggaatctcaagttaaataatagcatatatttgagtaacatataataacatgtacagtgcacattgattggacatacatattaaacgctggcgttaattggaaatagactttagggaactgttaattttcctgttggtactattttgatgtgtttctgatggtgccattttgatgtgtttctgatggtgccattttgatgtgtttctgatggtgccattttgatgcctctaaccacctttgacctgtcctctaaatactgattatagcataaaattttggaataaaggtaatgtgtctaatctgaattcatcaagataagaatataattcttttaagagtagaagttgattaaatacaactgaaacaacaattaatgtgcagaattatcctctagttagacaacaaatagacatgaaaataaaacatatcagaatgtactgtgctgatacattctgtaagggagacaagtagacaccaaggatcatggacagttcaatttatatccttcagagtggaaactttttttattaaaatgcaaacaaaactagagctttatgctctgtatttaaacatatattctttgagtttaatccattgaaaaatctattaataaatcataaatccagagtaaaaataaaagatgtggaaataaactgtgatccttaaaattagtagtgggagcacagttttaaacagctgtagaccattttaatttgtaagtcagtttttaaaagatttcaaatacatgacagaaaaaaagtaaagtactagagaataaaaataggtagaaggaaagtttttcagttcattctactttaacttataaatacataagataaatttgcaataaaataatcagtttaaaaaatgaactgctggtatagcagtttcccaatatattcttacagatattaacttacattatcctcacatgtagatattattaaccccactttacagaagtaggaactgaggttcaagatgttttgccaaaggatgctccagttaccttcatgttacttgctctctgcaccaacatggcaggtgaaacagcaaaggtagagaatgagggggatatccctggcttgaggaacccaaagcctaagtatacttaatacttattccaagagtttctccatagtttcctcgtgttgagttaaatactctccaagatgtcagaggttgaatcattaaatgatagaatagtagcaaactagtggtttgtagaggtgatgcagctctcagagagctttattctttattagttcataaatcgtgatggaaaaatcacatgggccatatctaacatctggaagttgtactaatttcagaaagtattttatttcatgaaaatctattttaaaaatatttaatctgtaatatggaacatacattttatatttttaaataactactttttaattattttaatatttcacactgtgataattttgcttagatcttcctggagagcagtaacactagtcttaaagaaaacattttatgtttgtatatgtaattcaagaatatcaaaggaatctataatctaaattttgatgtatttcactgggacaaaattaataaattaataagaacctttacttgccaaatataatcagatatcttagttagggatagaactggtgaattagtatggaagggaagtgaactatttctcttattgtcttcaaaccaatatttataaaatattcacaggatattattgaaaaaaaatgttctggttcagtagaatgcctctctatgctgattttcctgttgagctgggatattggtaatctatactaatgagtacaagagccattgcagattacagtattttgggaattagcaactaagcaaaacacacaaattaaagaatcaagggcatcataaaatgtactgtatcataaaatctacttgttcatttattttgacaagtgtagtttaatttaaattatttatggtactgtgtactccacaagtaactgtaacgtagtgcattttgttaaaaataatgaagttgaagctatatgagcttttagatatcattgtgctaaaagattagagcaatcaatccattttttctttaccatttctacagacttttctacacacaaattcatagtattcatagtattttcttttcctattcagccacctgagttcactgtatatcttggcaattattttattacttatactttaattagtgaattctttgggaatgaagtttttcataaaataatccatgttaaaataaatgaaatctcccactaatctagtgatttgttgtaggtgttcactattccactaagttacattcttcctgttaaagtttacaaattgtagttccatatgacaaaaatatctctttgcccgtactctttttgtaaagtgtagtgtgatagtaaggacactgctttggcattagataaacctgaattcaactcttggcctcattcatgctatttaacctatctctcagctgtaaatggattaattctttctaagtgataacgtttttgtgaactagataaaaactgaattatctagtacagcgcctggtatttaatagtctctcactaagttgtggttgtcattatattaactagtgttaacctctgaaaatttgtgaaattggtaacattggtcttcaaaatcagctttctctttctacatttttgtatgttgttttctttcaggacagtgattcagttctctgtctacagcatacacacacacagcattgtctactatggccttccagaataccagaaaaatatttaacattcaccacacctgtctcaatctctttttcttgaggactctgaactttcgggaattaacactcaaaaagtgtggtgcttaaaactttacctgtttagcttcctttagaactgagaccttcatattagttaatttttgattatattattactccatccattgcatcctttctacctctacacttataaggcccagtagttctggtattgaagaattatatcatttgagcacatacatttgctgtgaagttattatcaaataagactatgttccatataaaaggcaacactatcttctttggaaaaaataagaaattgatgttactatatgcttagcagcaattacattcatttaaaaaaatattccttatatgttgggtagagtttttgcttaagttttacttattaatttgtggcaccattttcaacttaatttcaaaagtgcacatcttaaacactattaaaagattctaggctgggcatggtggctcatgcctttaatctcagtactttgggaggccgaagtgggaggatcacttgagcccaggtgttcgagacaagcctgggcaacatgatgagactctgtctctgcaaaaaacaaaaaagttagtcaggtggagtggcaatgcctgtaatcccagctactgtggaggcttacctgagcccaggaaattgaggctgaagtgagctgtgatcatgccactgcactccagcccaggcaacagagcgagaccctgtctttattttcttttcacatatttgttttttgtttgaggtatgttataaataccttttcacatgaaagatttagatagtcatgaagttattactaagaaccaaaatgacaaaactttattaaaaatgtaacaatcatccattttattcctcccctattgaaacgcttaaagcatataaatggtctatgctttagagaatccttcagaattacacatatgtcaagaaatctaatttgtatgcatcagctttcattcctgtgtttgtgttggctttaagtagcagcacagcttttaattgtgaggttttaagttctgcaattaaaatgtaccctttttactaggagggttgagtgatagtttttgatttactttagacagtttagacaaattatatttaaaagaacataaagatgcacagagcatttcctgattcagagaaggtcaaagtgtcttacttgcattttttgaaagttttaccttgaataactaatgattcttcttactgtattgactaaacttctctaaagacatacaagcaggatgtcaaactgctttaaaacatcaacttctttgaaatcaatgaccaaatgaccttgaacagaatagggaacatgatattttacatctcatgatgttttattaaaattacttctatgaaggatgcagaaatagattacattagtgcctccaaagatgcttatatttctctttttattagttatgtgtttataaaaataatgaaaattctttgcaaactactagaaaatttgtttagagctttgatcatagcaaaagtgtagtagaaattctgcagacagatgtttaatttgatcaagggagaccataaaatggataatcctggtcaataatgaaagttgaggtcacagaaacaggtttgtggaataatgaccacaaaaaaatctcatggagacctttgagaagaagcacagtaaagaggcattacaactatgaaatagaatttaaattaattccaaaaattctggggatatctgtgtaagccagaaagaaaagcatttcaaagacacagaaatataaaagaaagcaatttaagatctgcttggtgtaagtgggtatggtgaagacgttggtccaggttgggtggtgatgtcaaggagagagtaatggtcagatcacaaagaatcttatgtgtaaggatattaagcaggggagatgtataattcaggttgtaattctagactaaataaattactccgactacattatttgataaggttgacattaacatcaggaaaagtaatcaagagacaactgtaatcgtagaggctgcaaataatgaggactttttagactaaatttacccaggcagtgtcaattggacatagaaaatttggtaaatccaagaaatatttgggattttgaagtgagagatattgctaaagtatttggataggagtaaaaattggcatttggattaattttttaaaatatttttactgtatctgtcaattttcaggaaatcaattaccaaaagttgatattaacatcgatgtgatgtagtgaccaaagatacattattagattcctatttctagaaatatgtctcagcaaaggcataatagcttaaaataaaaacttaatttgttttttggaattaaagcaaaataaaaatttacttggaccaatcttaaaccacacactctgttttctctctgagtttggaaagatttatgaagttgcccagttgttaatggcaaataacagctgctatttttacatattgaggatttttttttttttttttttttgcaatctgtgataaatactgacagaacgttataaaatgacaggggcgagggaagtgcgaatgaactggcaaacacaagcttccactatttattttaatctcactgaaactacagtactgaactataaatatattagcaaataatgttattggcatatttttgtgttggatataaacatgccatgttggatttgtttttggacataaaactaccattttaatagacagttgttaatatagcacaaatattacttgtgctgatatgaggatgctgatttaacttgttcattctgttctgcaaaagcaggaactgccttgggcaaaactgcaaagtgccagaagttcctctcttgggcttttcttctcattcctggaacccacctatgccccggagttgaagcactgtccctatttacttcccttgtgtgcaagaagcctatgatggtgttctcaccatattacctatattgtaatgtaaactcatctctattttataatttttagattcataatcggttgatgaaagaaattaactaattgtggtatgttaatgaaaaagtcatgacattttggaagaactccatcactttggatctaatttaaataaatcacactctccatggagatcttagactacatagagaagtagagtgataccatgataagttagtgaaaaatatttcacgataggtaggccaaaagtagactaatagtattgtgatataatgatgagctttgagaaatctgttcaggaaattcttcataatatgtaacactgcttagatttaaataatttgattttgattagaatgacattaacaagtactgatatgtaacaggtacttaatgtctgaatttttgtacttaagtctttgtgcttagggtacttatcagtggctgactgcctataaggcaaaaacatttaaaaatagaatacaattttttctagttaaaaataatggaaaaaaaagaaattgtcagcttatgttctctcacattctaagttaattttgtgacaagttccattttcccagggtataacattaatgccacatatcaaaaggaaactgtataattctgtgctgtgattgtcgaatggctcatggaaactacttaagtctcagcaaaacactcttgatttgtatagctaaacacctgggaaatttaaaataatctagaacgacatttcctcaaatagcctcagattttaataaatgaaagatttgaagaatatatctctttaggaaattgtccttaattatcttttgatgaaaaattccacaaagaaaataatacaaaaattataaagaatttggccaggtacagtggctgacgcctataatcccagcactttgggagactgaggtgggcggatcacctgaggtcgggagttcgagactagcctgaccaacatggagaaaccccatctgtactaaaaatacaaagttagccgggcatggtggcacaagcctgtaatcccagctactcgggaggctgaggcaggagaatcgtttgaacccgggaggtagaagttgcagtgagatgagatcatgccactcactgcactccagcctgggcaacagagctagattccatctcaaaaaaaaagaattcaaatgaatattattatcgcatttctttctccaagcaaatataaaagctgtgctttgtatcactgttaaaataaaacctcctcctaattattgctaaaatatttgtctaattaaaatactaagcattttcagaagactctaacggtaaaccaggggattcagtgcatttcagttctatatttctgacatttacaaggatgacagacaatgcaaaaataaaatgttatgtgttttcctcaaaaaacaaaccacagctggtgggtttaattttattcctaccagccgtgacagcaggctttttaaatattgaaagtgtgaattaaagcttctgcaaaacaattgccatataaatttccttaaccactatgaattacatatgaaatatcaaaaaattgtcctggcttagctgggttcatttttaaacataatgggaatagaaaatgttgactcttttgaggcaaccgaaacctcccagagaatgtagttgagtgtttgcgtctcatagattttggtggttgtcctcaaaaccatcaagaaagtagccatcaagattccctccttgttttctagtcatgtcctggtactttgatgataattgtatacaaatgtataaacctttgtaaggttattgactctttacaatctagctatctgatgataaaactttctctgaaattaaaaatattctacgccccatttggttcagtggctactgacatgtgagtattgagcacttgaaatgtggcaagtataattgaagagctaaattttaaaatttacttaattttaatttaaatagacacatgtagctattggctactgtattgcacagtgaagatccataacatgaagggtacaatactgtgttctgtgttccagagaagacaaagcaaacaaacgtgaaatacttctcatacggtaggtaagataagatataaatatgtaggtaaataattaataatacaagtcaggatgttgaaaaagattttagatagactaaaccccttgaaagaacatattgaagcaaaaagtggggaaagatcaattctagtttatgatggaagagaaaggtttatggaaacagaaatgtagacaaactttgactagtaccttaacaggtggagctaatggcattccagagggtgggaactttgtgagcaaatgcagcgctttggcaagaagaggtccaatcatgtagctaatgagtaataagatttagctagagggtcaagaaagaagagccttgaatattggctagggcctaaatacggtaagcaaagaagtcttaaatatttagtggacataagagaatcaatctctaaagatgtagggaggtgaaataggaggttataaagtggcccaggagagaggtttgatgccagaatcacactggtcgcagtggtaagagaaggaagatgatggggaggaatgtcttgggtgcattctcccatagctgctgtctcctatagtagcatgtattatgtatttcttctctgagacaaggtctcaccctgttgccgaggctggagtccagtagtacgaacatggctcactgcaaccttgacttcttgggctcaagcaattctcctgccttagtctcccaagtacctacaagtgcatgccaccacggccagctacgttttaaatttattgtagagttagagtcttgctatgttgcccaggttggtctctaactcctgggctcaagcaattctcccactttggcctctcgaagtgctgggattacctatgtgagccactacacccagctttgtagcatatatttttaaaggggaaataaaaagccaatctgttcctcctgtacacctgtagccttctcagcatagtacctaattatatttcatagtggtttattttcaaatacccagtcctaggcacaaacacatgacaagatgtctaagaatctagcaagatccaatgccttaaggcttgattttaaagagaggaaagagaaggtgctgagatatcagcccgttttcattgctagattacattgatagtgaatagatgggaggaatagaagggaaatacaaacttactatttctttgtgagctgatttaagcctgattccatgtttataaattgtgagaaaacttaaagctttttccacgaaataaatgtctaatagggtcatgatttttttcttcataatttgctttcgaatgagaaagttagaaaatttaagtagagacttcaaaatataagggtaagttgtctatgtgaggaatatttattcatatatgtagtagttacaattgttaagcttgagaaatttgcaaatttacaatcatgggcaaatgcttgaacttggtcgcatataaacaagaatatacttcggtttaaaatttgtaaatataagttttaaaatgttcaaataaagaagtgacagttccaattctttagtaactatcctagttaaacgcatcaaaaaatatacatgaacagtttacttgtaaaatgttatcatactgttagagagggtgtttgttaagaatctagttgtgtaatgaaattgctaaacaggatgttaaagcactaccaggaatcttacacatcttcagcatatcagaaatcatgcaaatgttgggctcaaagttttagtttgttcaaaaatgctttcagatattaaattggtatcttgttcccataaatactttttattgatgtgcctttgttttaggaacatttcaaaataggacttaagagattaaccttaatatgttcatacactttgaaattttacccacaagttattatgacaaacattttgtatataatgagaaaagtttattttctataaacgctgggtaaatgttggaagcagaaggactttgtttttgccaactgtttgcttaaacctacacaattaaatcacaattattactgcttctctgaacagtttctaaatttttggttcacatattccttggtttgtagatgtgtatgtgtgagcttttaatacaaccaaacttttagcatatctataatcactacagtcgttttgcattttgagtgtgtttgtctcatactctgaaaacaatggtatattttttattgcaaattaattttgttttcattattcacaaaagcctgcaactcttttagttattagaccttctttgttttgatttaaacatatcctcttactaaaattgtttatattcttcagtttatattaatataaagaataaaatttttgttttattttgttttccctggatggaagatttacacatacttgccacattttctggttgctctctgtttctgttagctttcatcttcaagctgaaatttttctaattctttgtctttctttcagtaatttaattccaccagaacagattaaatatgctttatttatattagcatataaattaataatgattcaaacaattatttaacaaataatagaaaaaagtattaaatggattcacaaacccagttagccactgcttgtgactcagatgctgatagccctatttctcaaagttattttttctctcatgtttctaggctaaatttaaatcgatcctggaatataagaaaaataaaggatggtgaatatttgctaaaaaagcagacaatctgaaaggattaaaatgctttaatcagacaggaaaaaaaaaggctctggccacttgattagggctgatttccaccatctgcttatacttactgaggatctagccctgactgaacactaatttgtgcacttcctagaaattgaaatctctcagcaagcaaattaacaagagcagggattcagcaataatggagctcctcggcttttgtttctctctgacagatggacagggtgcgctcaaattgaattcagctttaattgcattgtgccatttaaaattttatctgctccacagattttgtttacaggtttcaggattccaaacctttggaagtttttttttttttttcttttttcagtactgggcaagataaagaacattgtaattctgtgtgactggaaggtgttcattacaactccttaccctgaagggtggcacgttaagaaaaggaattatgttttaaagtctggggcaaatgggaaacaattcagactttgcatatgttcaaatattagcagctcataaataaaagtaaccagaaatgctctgtatttcatatctaaataagaaagcaatttgccttgtttcaattaatgcgtttcaaactttgcccatcagtgtatcacttggaaccgcgaactcctgaattctagagataaacttttttgtaaatgaatcatgatgttctaaaattacttttagtttctgcttgattgacagtcttcagatagaactgacttacatgaactgttcttttgagcagaggtataaaatactaaatcatttaggcatgtcctaaacattcctgtgaatctaatgctgaagatgcatttgttgcaaaattgcttgtcaatctacaagcatttcctcataaatctatggcttagtaggtactaaactctgacatttctggtggcaaacagagatcctgagagcttgaatataccatcataagatttgatttgcaccctatttatgtgaagattgaagactttcagctattgagcacctttccaggaaggactgaatttgcttcacataaggcaaagagttcagccttaggaatttagggatggaggacttcaagggaaaagagtggattctccaaagtctagaaacactgctgtgtgcttgtctgtaagttacatgtgtataatgcacactgtaaaggcttctgaaatattttatttactttaaaatacatagttgctatttgtttatattgttttattccataatttccttccatttaagactaatttgttcacaggatattagcaatgtgcaatgtctcctcggatatggcagagtattttttttattgttgcagagattttttttcaaagggactttctaaattattaataataattaaaatgatcaaagagcgatatctgaggacttcaaattagccgctgaatcctattaaaataccatgtagatgtttggataaagcaatttcatcctagaaaacaggcttacattttatcataatgagtcatcttaatatttttcagaggtctcagctaaatgaggatttgaaatactggttaagtaatcaagtgtaggtgttgtagagaacatcttagttttatgaactttaggaaaatctctcctgataattcttcatatgctgtacctactttctttataggcagtcgggagagaaagtgtctgttgtaaaagagcaaatgttatcactacacttaaaaatctagaaagaagttcatctaaaatttttggcttttcatgttttataaacagggcttcactgagcggtagagagtgctgatctaaaaactatacttgcttcccaaactcttgtgttttcccttgtgtttgtcaaattgtgtttattttattctttttagtgctccggctattagatttctcagctttctattcccctttgcttctttgcaaccattggaagcttctgtgccttattttagttcctttctcagatgttgttcttagaaagaattaaatttgtatataatcacagtgtttgagagccgaatggaaccttagagatagtcttgtccaactttcgctttttataaatgaggaaactgaggcctggagagttcaagcaactcacttgaggctagcctgtgtgtcagcggaaaggccaaaattaagacccagactcatgaatctcgtcagagagaaatttctggaaataccaaagagttcactccccaccccacgtaactcctagtgcagtattcattctaaacataaatagaaaaagtatccataaactgatcactaataaaatagtgtacacacatataagacacatgaacaatcaagattttttccatccgaaaatggagatataatgattcctcattgccagtagtcataatgcctactgcatttgtaactcagacccatattttttccttttggctcttccaaaatacattctgcacctatgccataagcatgcatttgtagattcatagcttcaaattttggcaatttgcaaaaccacatggccagatttgggccacttctacttagttgggaattccatcatagaaatgccagtcagggtgccgaatgaacctactgttcttttcttgccaacacagtggttgagagccggtatgtgctatctgtctcggttttatagtctggtacaataatgtcattgccccatgtggcaaatggtgtaagctattgtaaaactgtttgtctatgtgattaagacattgctgcagtgtacagcaccagccaattacttttttaatttaattatagcagaaaaaagagaatagcataatagaaattcttgtcatagggaatatgtaaaacgtaaattgaagagccatgaaaatttcatgcattggcagccagatttgtttttattttcaacttgttataaagactgcatttattcaatgccgtaaaataagacataccagcatttagtaattacttagttctacatcaaaataattatatcctgtatgcacttgtgatctcctttactgtatatgaatgtacaaataaacacttctgggcctgtatcagtttttacttttagacagtgtaaataaagctgaatcttcaactttcaaattaaaactgataaccttgggcattcaaggcttttataaaggaaggggggaaactttagcttcctcaaaacaggttgtgtctctggaatgcttctgggactaaagagatcaattaagtgtgtataaacaaacagttggaaaaaagctactaaaacaacagaggagagagctctctattgggctccagaggcctgggggagcgaagtttcattaactggatctgaagtcctatggccttctataaacaggcattaattaaagaatgtaaaaaataaagtttcagaccttgcaatatgttaatgatcatatgattcagggcctgggaaggagaagagcagcagaggtcataaaataagcatgaagcatttaatatgagtgcttggcagggatttctgcaaattagttggttatttgctggtccaaagcaaattaaggtgattttgcttcacttgctaattttttatgtgcatgcttggcaaaatgtttttcacaaatggatgaaggttattgttaatggcataatgagaaatattaacatatttaaataaactccaaaattctgacatacgacacaagcatgcagtttttatttaacacagacattgaaattctattaggatctgaagatggttttagacgaaattatggaaaatactcaagtcatattgtttgggtgtatgaatgcaccttaagtacttcttcatatgtttgcataagagtttttgaaaaaaaattataggtaatggatatatatatatatatatatatatatatatatatatatatgtatgtaacaagttctctttaaaatcatctttcatagttcatttgcttgatgccggaaaggggaaaagtcaaacagataaaagcatatcccaagagtaagatactaaatttagtcatttaagtctgcttatggtgtttggagaggtgacatttttgaaaccctggatttggagacacacagcctgctttctttcttaatttacttttctatacctatttttattttaattttgaccaggctaagttgttctgtgtttatatatttctacttggttccccttaaacggttacatttcatctggggacttaaagtggagtttaaaaatcggagcaacttctctggaaaactcttttgaaattacagtgaaactgttctgtcactttaattaccatgaagttgcacagaagtactgaatttggcaacagatccttatatagaaggaggtgctggagtaggatgctgctattgacattgttctgttacagcaattttggatggacaaattgcagttgagaaaatttcatgactcggtaaaatgagcaatgatgacatctgtggatgcgggtctgttcatatccttgcagagcctttagggaaataaatatctcggaacattcggtgaagtgaagctcactcaataaatcaacctgacacaataacacttctggcacatgagccctacttctcctcagcaccaactacccctctgtgttcctgtgctaccaaatggtgtctccccataggcctctaaatcaaatcatagcacacaaatacagtgagaatttattgggaattggttttgttcggcaaaaacattacttattagatgaactgaaatgataataaattttgaccctttaaggactgagccagttcagtcaatgtactgtttgatggaaggcatctagaattatcttaagggtatcatcttaccatgagctgttttaagttttattgggattacttttctaattttcagcttaatttttttgatcacatcacatggaatgtactgtctgcaagtaccacgttttcttttctaaatccttcagggtgaaactgggacatttgttaggaatatttaaagtaatgagcaaaagctaaagtgcgtgtatattaaagcagctttgaatcaacacaaggtaagtacagggtggttcaaaaattacaatatgcaactaaagatttctaccattattagtaaaatgatcatacctgagttaacaaagtgagaaaggagaatattatcattaataatattagaactattgacacatacgagaggattatgttaacttaggtgtatttggaatttctatatgtgaaaaaaaacaaaacaaagaaatataatattaatatttcttaccatggagaaataatagctggtttctatttttattatttctttcactagagatagtagttaacaaagaggatcaataagagaaaccagtttcctaaccctaagtgtccgtagatgtccttgggaaataaaatatttttctacaaggcaaagtttactggtgaattttctaattgaatatgtttatatgaactgtccagcttacaaattagtactatatattacttgtcttttatacaaagtgtgtgatgtgtctctatgtgattttcttctttatgagattttctttatgtgatttcctatcataggccttataattagtttgaaatataatattttttgtttgcttaccggccaagtgagacactttttatcataaacatgccttgggagatgttggaaatctttctggaggaacagtgtgtaaccttaaatcattcattaaaccaaaacattatggcatttctaatgggaattactaatactgaaaatttggttaatagtttaaagctttgtcaccagccaaatttgtagaagtgatagtataatatactatgtgttattgaaaagaagaaaagtaagatttttataatagctataggtttatctgcttatagttttgatctataaggaataattccattaactatttttatccaactgcaagaaatctgaaggaacccttaatttttctttaaagaaacctttaagttttaatgatattctggtacaaaaagaacaagcactattattctaacttctttttcatgaagaaaataataatacctaaagaattgaggccattgtgaagtcacttgcagaattagtaaagttgagtgttataaaatccaaaatctagaagagatttcttaaaagaagcatgttcagtaatacaaggcattccagaaatagagttgcttgcttccttcttaaagctcttgggaaaacagaagtctacagccttgcttggaatgttcatgtctcataacgctctcttagatatatttttcgtaaagattagcccaatttcttcttgctatacattattcattctgataattatctatcacctaagcacctactgcataccacttaccacgccaagctatgtacatgcatttttttaaatttgctccttccaacaatattgcagggaagatattatagtgctcacattagagatgcaaggttaaaattagatgaggttaaatacttgatcaaagttatacgtcatacaagtggcttggaaagtatatttggccgatttcaaagtctgatttgttttgttttttgtttgtttgctttttctcagtagcacatactgcccctggaccattgattgccctatatcagacattatactaagtgcatagaaaggtacatgatatgttttctttccctcatttggaggaatctgactccaaataaatgatttcagtgtaaaatgagaatgctgtgggattatagacaaagagttaccagccctccctcgaagagatggagagccttagggaggagctgggagttggaccaggtcatgatgtttaagtacaaggcaaaggagaggaacgaatccagaaagtaaacatggttcactgtggaaatatcaagaagttctgtaggtgaattgtatggaatttgggagaagcattaagaagtgagatttttaagttagaaatgtgaatttactcctatctttacagcgttcttgaagtacttgaggcccattagtgtcatgtctttagcttaaaaaacaaacaaacaaaaaaaaacattttgtaaatgctttgatcatttttcttcctaagtggagaagcaaatctagatatgagcttctaaattagaaatagactttgctgaaaatagtgatattatctcattttatactcttatttatgttactcagtaacataaaaaattaactaggacttccaataatggtttattgaaattttcttttaaccattctttggctatggtttgagtatactatattctatgtatattatttgttagcaaggtttaagatatgcttaagattattggaaaataagatcttgtactctataaagtaaggtttctttttaaagggcattagttttttgtttttacctttcagttaaaatgacaggaaactaagattttgtacttgaatgtcaattcgagggttaaaaattagtataaggaattctgcctatatttaccttttaaaaatagttgcttgttgggtgcggtggctcacgcctgtaatcccagcactttgggaggccgaggtgggaggatcacctgaggtcaggagttagagacaaacctggccaacatggtgaaaccccatctctactaaaactacaaaaattagccgagcatggtggcacgcacctgtaatcccacctgtatgagagatgaggcaagagaatcacttgaacccgggaggtggaggttgcagtgagccgagattgcgccattgcactccagcctgggcgacaaagcaagactccatctcaataaataaataaataaaatggttgctcattattatttttaaaggagattagtgggtaagcaaaccaatgcaaccatgacagaatatttgatgtggagacaccatgttaattcacctaggatttggttagtcctgccctggcaaggccctttttgtgttgaattgtgaataactatacatatgggagattgatacaggaaaaatgggtttgaaggtttacaggaatctgacttattgaatatgtgattgtacatctcattgactcagtttctcatctctaagttgagttgacggagagcatgggcttggacaggctgggtaaatatctagactgtgccactgattctcagaccttggaaagtaacttaactactttatacctttttttttaaggaaaaaatggataataattggacctaattatagcattaaacacagcaaaatgcctgccccttataaagtctcaaaacatattgaaaaaattattaatggaaataaggaggttttaagaccagaactgtgatttggattctagctccagctcgccctcctactcattagctgtacgaccttggtcaagttacttaaactttctaaacctcaatttttttcactaaaaaagagattaccggctaggcatggtggctcacgcctgtaatcccaacattttgggaggctgaggtgggaggatcgcttaaacccagtagtttgagaccagcctgggcagcatagtgagacctcatctctacaaaaaataaaattagccagacaagtggcacatgcctgtagtcccagctactcgagaggctgtgcttggaggattgcttgcagccaggaagtggaggctgcagtgagattgcaccactgcactccagcctgggcaacagagcaaaaccctgtttccaaaaagaaagaaaaaaataaatagagagagatatcactgggttgagaagtaagtaaaatagatgttcacatacttacttcccttttgtcttcaatctatagcaaggaatctggagacttggaaggagggagattgaaatgaaaagggtgtcttagaatggaaacttaattcagattcttccattttgaaagtcgctgaagagtcttctaccacttctattttcttgagtctcaaagatatagttaagcagctttcgactgaaaatattagaagttcagttcttcagtaaatacatgttctaacatccttaaagtataactcaaagataactgagaattctggacatttaagtaaaactgctaactagttttactctttttcacaatttctgcttaactatatgctacttttggaacaagttaaccagtgttttgttatgattgtcattatttcagttaaaactttaaaaatgtatttttcttaatatgtttgatacttctcccattgaagaagtgaatttagttgaattgaaagaggctaccacacaggttaaaagctgctccaaaagagaggacctttacaataatattcttaggaatatagtattttgcagctctcatattagtccactgtaggctacttacctctttctttcattctgtcctctcctctttcatgaagagtcaggtaaaattaatgtaggtgctcctagctctagtgaccaattactaatatttcctcccaactgaatgtggcatattaacactgagagcaaagaacttagtgtctacaaaataaagttagggctagataaagtcgaatgatggccagccaccactaagagtatatgcctccttctagtggcatgctcagtttccatttaatagagggtgatattgaacatacagtgaccacggattgatcatatacaaacatctgaccaggttgaactctcaatttaacatctcaattttaaatttttacaagttgagtttgacaatattttttgttcaccctgtattgtataaaattattttcagaatttattgtctattatcaaaactaaaagtatcctttgactttgaggaaaataggaaccgttagccaccatcttcagaataatgtaaaggctgattgataatcatccatcttgtttttttcctgctgtctggattccaggggtgtgtgtgtgtgtgtgtgtgtgtgtgtgtgtacaaaacacttattttagaactcacatttcctttaaatacacaatttgttctgctttaaattatacttaattatttatttctatctacatcacattttgcaaactagagttgagcttaatatgtcatttattcagagaaatttactgggcggaaaagttagagtaaaatgcattgggttgggttatatatgaaatgttaacaagtattaaagtggtctcaataccacaatccggtaaggaagcaagatctacaggataagaagctaagaagaaaagtaattaaaaggaagcgacacaagaggaaatgcaaagacatacatcatcatgtaccaaatgagtgatacagttagagtgtccctccatggaaaagagggtgagctttccgtgggttgctgaggtggctttggtggagaggttgctagctagagctagactttaataataccaacctagacttgattgaccagcaaatatgtgaaatgagcaaactatattggagctatctgcttctttatatacttaaacaagttgtagttgggcagtcatcaaaatatactagttttgatgaaactttattgcccatcaaaatattataatcccatttaactgtgaattcacttggaaggttagtacttttaagaatagttccacactcaggccaggagcggtggctcatgcctataatcccagcactttgggaggccaaggcgggtggatcacccgaggtcagaagttggagaccactctggccaacatggtgaaaccccatgtctactaaaaatacacaaaaaattagctgggcatggtggtatgtgcctgtaagcccagctacttgggaagctgagacaggagaatcacttgaaccctggaggtggaggttgcagtgagccaagatagcgccactgcactcccgcctgccacttgggggacagagtgagacttcatctcaaaaaaataaaccaaaccaaacaaacaaacaaagaatagctccaccctcttattttaaaaataaattatcaagaaaataatctgcattagcctcagaagataatatttcttcatttagtgtaaatcattgtttgacgtccgaaagagcaaatgggttatattagcacagctggttgcacatggcacacttttaggtgtaagtaaagagagttagtcctaaagaatctagatttgactaaaggaagatcactgtaatatgcttctgataattttggcccattgtacattaatacacagaaatgctatcttgggaagtatctaaaaatcgttgtcatgtcagggtttcagtcagctgtttcgttactggatatttcttgaaaaatagtggatcatttgaagacctaataatttgagttttgtttggcagatttaatgttcatatgttgttgatgtgatcatttagcctatacttcaattaccggggggctctatgaactgttttgtaaattttgaggtagttgctttgatgcagctgtagaataaaacaagaacacctaactaaatagcctttcatctttccttcaaagcaagaaataaaaataatcattgcaaagtaatgcttttttgtgtttcttagattttgactttcctgatcacctggaagttactaacattagtttgtcttgcaaagccaacatttgtagaacctcttctatgtaagagagattgaactaaatgaaatgcatttttcaagtaaactttttggtagctctcattatactactttggttctcataatatttaactctagatttttgcttttatctttgtatatcacataattttagaaggcctttttaaactacagcatcttaaccaccaaatatttattaaacctccacatccctgcattatgccaaaggccaaaacgtgaaactctaagtcaagtcatcaaaagagtcatgttgacttctcgtttttcttaagcgtcaacattataattcttgaccctaaggagacattttagaattggttcctgggttttagtgggacttctagagatgcttcagttaaaaactatcatgcattaagcaaatccatgctgtgaaatcactaaaaggtatatataggttcgactaaagcattcgtttgtttttcttttgcactgtaagaaaaaaaaagtctgtttcaaatcctatttgtcccttatctctgtttgttcagttgtttttaatatcacatactgaaagaatttcaatagcagtttcaccatgaagtcatttgttatccttcagcaggcttttgcctactgaattgtaaagcagttctgactatttgcatcctccagatggagcggcatataaacactcccagatatttctggtaagtatgaaaaaatatcttatttgtcctttctgtgaataaataagagaatgtcaaattttatagactaataaatttgtatgccggcactgacattgaatctcttgtggcctgcattgtcacagaccctgagaaacacattttttgttgttgttgttacagatgaatactaagtcaaatagaagctcaataaaaggcacggtttgattgcattgtttatgtctgtccaatattctaattcagttgcaatatgccatgaggaaatgcaatttacatgtttcccaggtttattgcacaacaatcactcactcatatatacttctatctgtcagagaaaaccccactaatgggttaaaatgccctttagcgtgtagtgtgcaacagctgccttcccagtagatttaatgttaatatttataatgtactcttacagatatagaaaaaggtgatagtgaaaggcaacataaatacctaaattttttaaatctaaaacttttgatatgtttattatatatatagacttatatgcacatatgataaactcagaaataatactttttatgggataaatcagatcccatcagttcaagcaaatctttatgcacttttccaacttaagattaaatttatttcttattttaaattgatatgcataacatagggtgtctaatcttcatattcagttaaataatgaagctctgcaatatcagctgtgattgacagtttaatactgcttttacacttgccagttttcatattaaatcttctagtttcttcctaaattaaatgcactgtgatctaaacagagtaaaatcatacattttacaaagtaaacagaattaaataacttttgagttaaatgtgtatagtaagcactgagaatttgacttggcttactttatccatgtgagataaaggaatcttgtgaactgaatacagactgattattttccagtctggtttttttggagaaggaattttaataagtaatacataatatttattttctttcattgttacaattaaaacagaacttggtatcatatttgtcaacactgatttgatttctggagaataaatttttctaagtgcattttagttgaatgaaagtatatctgagatataaacatttagaatcaattgtaataatgcttcagaatggaggtttataagagtttggaagcacaaattctatttaagttattacaacagcatatttgtatgcattttttccaattatgagctgtgaaaaaaggttgaagttcaacttgggtacattattttcattatgatacattagccacacatgtctgcccaaatgtccttgatctctccaaaagtaaccataagaaattaaaagtaacaatgtattttacattttatgaactaatatagcggtagaagaaggtgtgtgtgtgggggggtatgtgtgatgtgtgtgtgtgcagtaaactaccctatagcagacaggacaaatatatttcttcacatttgattctaaatttggaagttatcacaatattaaattatttgattcgttatatgttagtataaacatataggtatatatatggacatacacagaaatgtatatgcatatttgtgtatataaacacagatactcacacatataaaagccacaggtttggcccagaaactggctataagagtctttatagactaactgaatgtatgaattggaaagaacattagagtgtctctaatcccacctctttgtttcatagattgatccccaggaaagttaaaatggtaaagttgaaccagatctcacatctagggattctaagacctgacgtctgtcttccacattgcctatttgattctggcatttattgtatctgtgaattgttttggaaatttctagtggcctaatatctcagcagttactacaaaaacccacccacacatacacatacacacatagtgtgtttatatattcacatatactatacaaactgtataaatatcagttaaactgtcactaaattctatacactactatatcactgtatttttaaaaatagttccaaagaaagtgctatttgagctcctttcagttattaagtctcctaaacatttatcttttgtttattgacatgagcctcccagatttccgctcattttgttcagctgtagtaaatttggcattaaaggatgatattcaatccttgcttcctttatagagttgcaccaaagtcaatgagaatgttacgcaaaaataaaggataaactatggcccgggaatactcatttaagactgtagcgcagacccacaagactaagttcagtgcctagtaaggggtgcgtgctaaatttgacattgcagaagagtttccagctgttggcttgatatgaaggaggagagctgtttttatgactgattactgtcctcgggagaaagaggcaagcgaagcgaggctacatctctccaatccacagaatgctgcgcatattctgtagcaatgatttgcgaaggctcataactttaatggttcatcatcaggtgtcatgattctaggctttgaaaatcctaaaacctaggaagggaagagaaggaatatgtgtaactaaagatgtaaaaaatactctaataaagtaagattacctttttaaaaatttcatgctgatgataagtcacttgtggcttgtctctctagctaaagtaacacaactagactttatttgccagctgtacttagagatcttgattttatgttttaaaaaatgtcatctcttccttcaatcacttgtaagtcccctgtaatctctttttaatgtaagcacgctggagttttcccttttgtttgctgcccttgcattatttactttgatctgctgtgagaaaatctgaaagtgtgttgtcctaaatgctagcatctcaccaacaagatttgaggccttgtagttcgcattgaagaaaaaggctcttgtgtgaagacgcaggttttgtttagttctctctccctggtgggaaccttaattgcattttctctctctcacagtggctggctaaggagtgcctgccttccctgctgatgctgaagttttcaagctctattactctgtgacggagaaaattctttggtccaggaagaaaaggatcagatttttttttaagtgtttaaataagtattgtcaatttaccatgcacaataaacaaaaagaagaagaaacattagaaaagcttttttttcccctctgaaattctgatagaagttttatgtcactcagtttatgaaataatggattctaaatatcatgaagaggctcagtcctcagggcaaaaagattggacttaataatagccagtaaacaaaaaatattgttaatttgtgtcctttcttagccattcttatatgattaaaatgtatattcaaagggctatttctggagttaatattaaatactgaaatgtatgccattttcagataggttgtaaagatctaattttattaacctttttactttctattattaatacaacttacagaacatgtaagcaatagggttgaatcattagatctacaataaatattttaatttgtttctcatctgacaaaatatacttcacctgcctggctatgaagctgtggccgccatgtcaacttccactttctatgttttccatcctgatgggatgcaaggcattaagagcatctacttacaatttcaaactgtcttaaatatagaagctatatcgatctataatacacaaggcatgtttattgtttgaggcctaaatgcttacatgcacatgtgcataagctaattgtatttttaaaaaactatgtcttgctatttcaactaaaatagatgattcaagtacgtattttatttttcagggccttagtattatttttttctttcctgtggcttactcctgaatcttatattgggctctctacccgccttttaaactttttccattgttagagctatgtttctcttgcagcctccttttattcacatttgccttgttccaagctgttgtccaccaatgcctgcccctcatggtgctcccttgaaaggtatgctctctggtacttgcttgctagtgagttgagaggaccctgcctgtccaagaatagcagtggggttttgtgatgcatagttgagtagacagtgcaaaaataggtagaagaaagtagcatgggattggttagttgaagagggagcaagagagaaaaacatgttaggatgttaagcatgtgaagagaataaagatgctgggtggaaaaagtgaagatacctttctagggattgggattatggattttagctctgaccatatgctcccattagtaatcattgggcctttcaggctttgtgcaatgagctgagcccagtcaacagagtcttttcagctatattgaaaagcagtgatccaacacatgaagtgaaaacatctccttgatacaagagtacacacggctttaggaacacattaacattataagacagatatgattgtcattaaaaacagcatcaggaagcctaggccttgccttattatcttaaaactggttagcaatgtaaagggaattttctaaactctaacttaaatgcataatatacatttgaatacggtatgctctttgggttatcttcaggatagtgctttttaaatcttaacagcaatcacatttacagctaacaagaatttactttttttcattgaatgattaactagcaggtgacacagagagacacacttatgtaactttgttcttcctaattagtgcgaaataaaaagaaattgaagcagatgacaaagatacaaccgggtttcttaataattttatggagtatatatgtttaacctggcgaattcaggagctaattggacccttattaattttgtggttcagaatactcttacatcttagaactctcacaattgaaaataagaaacaaattgcatttttagagagttcaaaggactctgttagcatattttatttcccctgaatcccattatatatttttatatgtgtacttcttagagaaatttttctagtgatcatcgcttttctagtgatcattactatttattatagactgagaaagaatagtcaattaggatccatacattgctgaagtcttagaacagatctagataattcagcaagtggctattctatttatcagcacattttattatgatagaaattctttatgatgaaggctggggaacctgattattttttaaaataggtcaagaaatggatcagaaaatctgcaggggatttatctctgtttctagtacttcataatgacaaaacttttcttggctaatgagcatgtctgggtgaattctaatatataaagaaaagggtaggagagggcagtggacttctaagagaatttgtataattgcagtgattgaattcaaaagattggaaatagtttgagaggagtaaaaagtgatagataagccccagtttgtgaagccaaacatactctgttttcttatgtgagtgggtgtgaatcacatgaacagaaaggaaaataggccatttttgtgcattgttgtataccaattcagagcgaaaataatgaatttttctacaaaactctggccttaaaattttctactttctttttcttacatgagcaccatatttattctagctttattctaccactacatttaattatttacccattttctgtgaattcatttactgaagcactgtttactgagtgcctacatggaacaggtactatcttgcctacacatagaagttctagaagttagaaaacatcttaaaactaaaagactggaaaacagtgcaaatgtactcctacttgtatgaaattatcgatttattcaggtccttggtaccattacaaatccaactgttgtgctaaagtatacatcacctttaaaacaaaacttcaaattcactgtactctctctatttcataaaggcagcaacctctcagttgtcctcaataagtttttacttttatgctaacacttttgttatctttagttttttttttgttttttttttttttttaaaccttggagaatatgtatttcatctcccaggatgagagccaacctatgttagtgagtaaatagagttaatactatcctgttttttatttttatacctcttaaaaaaggaaacaaaaaaaaaaccttaaatcaaacctaaattattttgtgtcttttatgtttttttccattcattctttaaatgccagctccagtgacactttctctgtgaaactctccctgcccagtcactctgagcaagagttaagtataccatagaaagatatttaaatttcaatcactcctcttaagactccttcttataatctattgtaaccattccttcttctctgcctttcctactaaaggcaatgctcttgggggcaggtatcgttggttatcgtttctgtattctggttccctggtacaatatctgagccataagagtacaggagatatttcttaaattaactcaatcatcctataattactgttatcacattatttttatcttacatttttggaacctctgcctgtcctttgataggaaaacataagcggggatcttgatcttgtttgtatatgttagtgactaaatttcatctctttcttttctgtaggaatattaagtaccttttcctagactttagttataagtttatgttcagaatgagaatggaacttgatagtgattagccagttttcaccgtattttgttcatcttgagttgccttttattgttttatgaaggcatcactatggatctaatacagctatctttaggttttgatgttagacctccaaatcccttacatgtcataatctttctggtgatagtgttgtaactcctttctctgtgcaggaacgtgtgtacgtctgtgtgtatagccactgactggtcttttgaagcaatgcctttatctttgttgttatctttcactgtcaatgccagtttcttattattgatccttccctctttcactgtcaatgccagtctcttattattgatccttcctgtgataatggcttgagggactttgaggaataatttttaaaaaatatttttggtggaagaaatcttcttactttgaagaaattagataaaataatttcaactttggctgacaaatcctgccctctcgttggtttattagcctgcaataatacctattactacactgtctagattcaaatgtgcacaaataactgtcatgaataagtattttatttttgatttctcaggattgttaggtatgaaaatgaaggtaaaaactctggtttagtgcctgccagagtacgcactatgggaaaaagcagatgaatggatgctgatgactaagatagttcctgatgctgtgatttttatgggagatttgtaaagaaactattcactttaacacaagataatatttgatacaaactttaccagtaatacagattattaggcactgggactactggaaggataagaacacaaacatttctttttcagtttatttatttattttatttttatttctattttgtttatttatttatttatttgagacagtctcctgctgtccacaggctggagtgcagtggcatggtctgcactgacttcaacctctgcctcccaggttcaagcagttcttctgcctcagcctccttagtggctaggactacaggcatgcatcaccatgcccagctaattttttgtatttttaatagaaacggggtttcaccattttggccaggctggccttgaactcctgacctcaagcgatccacctgccttggcctcctaaagtgctgggattacaagtgtcagccaccaggcccagccacaaacatttattttctaatgaaatgatgtttaatgggttttgcagaataggaggatgagacatgagtgaaatgtgtccattttgcctgaaacttaagggtctgtaggatgatgagatagttacagctttggagatatattttactgggcaaccaatgtctagttgagaaattggtacttattgcagtaatcagtgtagcatcattcaagctttctgaagatgggatgatctgatccaattcaacattttaaaaacatatgtaaaggttcacaaaccttttgtgtagtgtgtgtcagaaaacagaaataaggaaatgttatactgaactgaggttgccaactcatatctcatagaaacatcattttgttcagtccagagtgatctttgaaccacatgaattatgcatcaaatttaccatgaaaattccaaagaaaaatcataattgttaggtcgtctaagaatcctaaagatctggaccttggccaggcatggtggctcacgcctgtaatcccagcactttgggaggccgaggcgggcggatcacgaggtcaggagatcgagaccatcctggctaacacggtgaaaccccgtctctactaaaaatagaaaaaattagccgggcgctttggcgggtgcctgtagtctcagctacttgggaggctgaggcaggagaatggcatgaacccaggaggcagagcttgcagtgagccgagatggtgccactgcactccagcctgggtgacagagctagactccgtctcaaaaaataaataaataaataaataaataaataaataaataaataaataaaaataaaaaagatctggacctagtgttggcatggcaacagttctctagaggtgagttacagttgcttcctttctgtggacctgtgtgcaggttcactgtggttcccacaggatttgtttgttccctgcctggttcttgaggcatttgagcttgtggcctttattataacctaatgaaccaaagggaaggcacagtgaaagtttcaaacttaccataacaaaatctcgctctgtcacccaggctggagtgcagtgtcactatcatagctcactgcagcctcaacctcctgggctcaagtgatcctcccaccttagcctcccaagtaactggactacaggcacgtgccaccacacccagctaatttatttttattttttgtagagataaggtctcgctatgttgcccatgctggtcttgaattcctacgttcaggtagttctcttgccttggcctcccaaaatgctgggattgcagacatgagccactgagaccggcctattcttagcaataatttgaaaatgtatttcactattcagggagtgtaacaagaaagttaaacaaaacattaaaaaggcaggaaagaaagtgatttcacttttatagcacattttttattttaccaaaggaagagtaaaagttaagtgaaggaagagaggggagagaggaacattcttttcattaagagaatttttttttttttttgagatgaagtctctctctgtcgcccagactacaatgcagtggcgtagtcttggctcactgcaacctccgtctcccaggttcaagagtagattttcaacactgataattctatcaacttgtagctaattttcaaaaatatgtggtagcctctgtttcataccgtgttatttgtaatgccctgcatattttatttgatatgttttataagggataaacaaaataatatatttaatctaaatatacataaagtgctccagaatcctctgaaatttaaatgatagtgtcaatgtaaaaataatgttattatttgattgatcacataaaaatgttaatatcatataaatttatatagcacaatgaaaaaactctaaaatgcctcactgaaccttcctcagttccctcaacttgccaagctctttctaacttttcagtctttgtgtatgcttttttatctggaagcctctcccgttctttcccttgctgatgtaattcctattctggtcacagttctttttaaatctctattgatctttacctgacccttatcccccagtaatgttttatggtttacacagcctttttatatataatatcccatttgatccttattattttcattcattcattcattcattcattccttccttcataggatgtttttgaagcacccacaatatgccaggcactaatatagagaagaggtttccagagatttaataaagagtttttgttctcagctcacaatatagtaggaaagagaaataagtctgcataattctctgtggtgagtccaaaacttgagatttgcacaagtagaaacataaaataggtggatgcggttgagtagaggtggccagggatgggaaggaaaaagacagggaaacttttttgttgaattttgaagatgtcaaagaagagatctgggaatagaggggaaaggagaggtggagaggtagcaagtatctccatcactccatgaaatggaactatttttgtttggtgtggttattgttttaccacttgagcttccaatatggtttaggttgtatgcaaagcgctctgcaagcattaagtcactcattttattaaatgactcagtaaagtaagtactttttacaagcaaaaagttggaggtccagagaaattaatgtgtcttactcaaagtatattttgcgttgccactttctgcattctattttctaaatggtgatgttaaaagggtatagctgttctttctcagatatctggatgtgaatgaagttaagttttgttctaaaatccaaaatcaaactcttaaaacgttttctgttacctttgcatgttatatatatatgtatataaatatatatatgtgtatatatacgtatatacgtatatatacacatatatacgtatatacgtatatatgtgtatatatacgtatatacgtatatatatacacatatatacgtatatacgtatatatgtgtatatatatacgtatatacgtatatatgtgtatatatgtgtatatatgtatatatgtgtatatatgtatatatatatattcagccctttgtttttgttaaattctcatcttttcactatatccacactgtaagaaagtttgacttaggtatgacagaagaaaaggtatcaaagttaagtcttgcaaaatgccattcaaatcttgctgaaaaaggggagcaactttcttttctaaatctgtgtatatgaatggttacaatgaaaatatcacataaagctccaactttctggtatctgcctttctttagtgatcatttgataaacaaatgccatgttagaccagtgtttctcctagggtaacaattctataaactataccagaacaaatttattgtttccaagtttaattttttggaaatgttattcttaaagaaatgataaatatatgaaattctgaaaggagcttactatgtgtttcaagagctatgcttaaaacatatgatttctacatattgttagcagaggaaagttgcagtttatatttctttactttcattataagaattttttttataaactattataaagaaaacaatagttatgccttttgaaaattaagatttttttactagatttttcaacttaaatttctccaaaaattggggacatttgttcaacattataaagctataatccacagaaagttaattttaaaactattgagtgctctcatttgtcactgaagggaagtttgaaaacagaaatcagggagtttattcctctaacatttactctaatgttaaagacaaagatcagtaaaatgtatatctcaaaatattaattacatttgacttatgtaaaaatcaaagtatcaagaaattagtgagttaattgtcagaaatctggcttctactactgattctgaatatcaccgactgagttgtctaatctcttggagcaatgcattgtcttttgtaaattgagagaaataactagcttatttataaggtccacttcaattctgaagttttatagttttatttatttatttatttatttatttatttatttatttatttatttattgtagacagggtctcactctgtcgcctaagctggagtgcagtggtgcaatctcggctcactgcaacctcctacctcagcctcccaagtagctgggactctaggcacaaccccttactaccagctaatttgtgtattttttgtagagatgaggttttaccattttacccaggctggtctcaaacttttgggttcaagcaatccaccttcattggcctcccaaagtgctgggattataggtgtgagccaccacacctggccttataatttattgatttaataattcatatatactcaatatgaatgttgagaatagtgggaatattacacataaatacttaaaattaaacgtctgacaaaggttagcaagtcttctatttgttgtccagtagaaatccaaactagacaaaacaaaacaaaaatttaggaaaaaatatagctccaatctacaagtttggcgtttggattagtttttttgtgttttaaaatgatggacataatatagatgcagtcactgccaatataattatatataaaatcacatagattgttaaaagcaagctaggataatgcagttcagaacaattcttgtttatttatacatgagtttctagaagaggggaagtgatactaagtttgattagcatcaacgatgtaccataaaatttttgaaaattttgtctacttaatgcttataataaccctatgatatagatgtcattattcccatttaactcatgaggaaactgagacttactgttcaagctaccaaacagtttgttggagacacgctaagagccaggactgtctgactctgaagttcctgtctctttaaggctataccgtacggacaagaagaagaaggtggaaatgtttcctgtctctttaaggctataccgtacggacaagaagaagaaggtggaaatgtttcctgagctcccctttaccattttaaggaactcatctgaaaacaacaagagggtgattgttgtaaaccatgggggcaaaacagtgaaatatatttgataacaggaattacaggaagctgaaagaatagatagcataatttgggataagacagaaaactatgaataggcctagagtgctttgaggatgcttatcagatgtttgcattggaggtcaagaggcttctgaaacttctgggacagggtctgggtggggagtgatgaaggaagaacaagttgtagagatcaagtcagatgagaagtcacttgctgaaggtaaaagataaagaagacaaagaaaaaaattaccagtgagtgacaaagtaaaagcaacagcagggtttatttggggtgtagaaaagatgctagtttttctatctgggtaagtaaaatttaaatatatgttttattcagtatgaaatgaaatgatatgtaagaaggtaccctcaaaaagtgaaaaagcagctgtataagattatttcacatgactttatgaatgataccttttcaatgaaagcaaatgatccagggactcttaggaattaagactgttatttctccttttttattgcttattatagcatcacccaaaatggaaacaatgaattagcattaactgatctaattctttattaatcaatatattaagaaaatattgcattaaaataacatctaaagttataataccatactatttaacttttctttaggtatttccaaaattaataaactcaattatacataggtgttacatgtcaaaattagccatggtaactctcacttctataatctgacctttctaaaaacctgaaaatcaaaagtttatcttgaatacatcctaaaaatagcagtaaaaagtgacttcataatggtgttgccaaccttggttgtgaaacattttactatggactatttccctcatagattgtgcccattaaaaatggttctgctaaaatttatagtgtaatagtgactttgagaaatacacaggaaggaaggaaatgtttggtcaaattactgcttaattattccaaagctggagtgactggctttgttttgcgcccttttactgaataacttttgataacaatcaaactgaaaagtcaagaaattaacttttatggaaattgagtcatgccttaaattcatttttaattcttatactgcttatttagtaaccaataaaactaaaccaagttgtgctatgaagtgaaggatcataacttcaaataagcaattccattttctccattatccctacacttggctggcaaagagtctctaggaattttttaatgtattatttaaaattgaaaatactaatgttcatactaatatgatgttagatttttcagttatgtttactggcaataacaaaaaatttaaattcagttctgtttactgcctatcattgtgttattttttccttcctctgtcagtgaccttcaaataatcttaataatataaaggaatgtctgtgacaactatattcagtttagacttcacattttacaactaagacaatgttacatataaatacataagaacatatcatagctaatgtatatatctttgtgtgaatatgcatttgtttatatatgtatctatgtttatttttagagacaaaactttaaaaccaatacaaagatattaaatcattttgcgattgtactaagacagtagaaagtgaaatgaacataccattatcttttaaaaatttatatcacagccttaattacctggtttgtctatatggccatggcaccagaataactgttatctgtctgtcttcttcagtttgtcaatttgaggtggcaattgtttttcttgaagagacttgccctgttgcccaggctggagttcagtggcatgcatttatggctcactatagcctcaagctcctgggcttaaataatcctcctgcctcagcctcctgagtaggtaggattacaggcgagcacctagctaatttaaaaaaaaaaaaaaaaaaaaaaaaaaaaaaagcttgtgttgagatggagtcttgctctgttgcccaggctggtctcgaacttctggcctcaagagatcctccttcctccatctctcaaagtgctgggattataggcatgaaccactatgccctgctaggggagcattcttgtagcacctttcagtgatatcttttggtaagcaagatggcaccgatttcacatcacttttggcctagcgatatgtttgtaaagacctaggaacaatgatctttctaacaatggcctgtgttgatgaatcatcaatttagtttcatagaaaatgacagtgacctattttgtccctgtctaccataatgccttatggttttctgaagaagagttggatttgttagagattatagtgccttttgaggacatgtacctagaaagtgtgttctagaatggacagcattctgatctaatacaatgagcacactgactttggagtctgattaacccaagaatgagtcaaaagttactaagcttttaaaatccgtttccacatctgtaaagcatggattataaataatgacttcctcaaagggttggtatcataactaaattatacggtttctaccatataatatgcactcaggaggtgtttcttccttctgcctccacatgttttctactgtagtgggatggcaggacttcatcacttctaccttgaaacctacagtgtctcacaaggctgcagatgaagagagtcattcccatttaaagaacactatgttatgttgtccagtctatttgcatgttgataacagaaaccctccatactgagaaatatagacatgaccagattattgtgtgatgtgtaaaatatgaagataattttggcaatgtagcttctaccttagaagctaattgcttgattttgcatctgttttcagaatactcagtggaactttaggtgtatgcattctagttgtgtataccaatttgtagttgactaattctgcaaatctaactgattaatatgaacaccagaaaaaaataatttcacttcagggcaatgttaacccagggagtcacatcactgaatatcattttgaaaatttgtttattaaaaacatttctttgacattggagcagctaacttgtttgtggtgttgttgctattgttcctttttttttttttttaaacaggcaatagagtgactggcctgtgccattattctatttatagaaagtaaaattaaagccttaaagataaacatgcatagtttgtgaacaaatgcaaaacaacaacctttatgaagattatttgtacgctatttccactggtttactccaaagatatattctcaatgataataaagtaataaaagattgttttcacagctgtttgtctttgattacatatttctttgaagtactgtaataagacagactttgaacctggaaagagatcaaataatgaattgttctgctttgtgaagcttaagaagggattttattgtcgaaacatatagtgcgacatattttttcttctaacagttaaataatggttgaaagtactatgagatcattacagatggactagattaaaagtcttggggccaagtgttagtgatcgttaccaaaaattggtgctttggtttaaaaagtcaggttttacaattaccaaacatttcattggtttagttttgagttaaaatagaacacagtattaatgctagaatatattctcagacttgtaatatttatatctaaagacaatataaaacttacattcacagatctcaaaagacttatgccaaatttgttatccacttcaggtttaggcagattagattaaagagattctgtaaattaaactaaatgtcattagataaaagaacattaacaaacatcatatggtttttcttttatctaaactagcaattttgaaaatgtagcggaaagttcagtagtaacactcttaataggttttcagatgttacatatgaatatggttgtaactattgttatttctacctaaattttccgcaagaattacatagtatctatcaatcagcagaggtgtggtacatattttaaaataatagaattagggataatcattgcagcactttgctcaacctaggatatatgtactatgtagtatcattataaagcattaaatggtaattgggtgggcatttcaatatagcatattttgttattatagttatatcgaaacaacattttgcttttgtaaacacttggcagttcatgagtatacattttagagagtaagaataacatgtatgtgcatatttttagatctcatttattcagcatactatttctctaaactagtttttgttgtatttggaagaaacttttttctttatttaagatataaacctttcaaatgataattttcatggaaatactagacaaaggaatattgtaactttagagtttttatgatgaaggtgtgtttaagagatgtcactttgatatttttacattatgtcctacatttgtcagctaaaaccaggatattgcctcaatgagaaaaagcatgttctgcacttgtcaaaaggcagtaagtaatgattaaaatagcagtgtgaaacgctaggagattaaagtgatgctaatgataagtgagagaagaaaagggcaagctatattttaatccctgagagaatggttaatgacttctattgcctgagattaaactaaacctgtctcatcagctttttctgcctggtgaaaaaaagctctctgcactttaatttattaaagtcttttaaggaagcacattgatctacagaggttaaacttttaaaaattgtgcaaaatacacacaaatgctttaacaaaagtgtgattttgttgcttttaggcatgctcacatattcataaagaacccattgtctattccttagtatgtttaattaaggaatgttaattactcaaactagaaggtttattccttttaaacatcagaacatattcatattactgtgtaggcaaggggcaagtatactgtagaggatatcagtctatatgaagagattaatttacagttgtaattactgcttggtttgtttagaataatacatgtacagttcagaaaatgaattattttattttaaaacccttttaaggatagtaaattgtaatctttaaatagatcaacttgccagtaactttagataacacgttattgtgaatttcaatgtttgatgattctcttggacttttaattatagtggcttttttttttcatcctttactcatcttcaaccataaatggtaacccacctttatgtaactaacatttacctttatacagtaatatttaccttttcttagtgagataaagagtgtgtgtgtatgtgtgtgtgtgtgtaatgatatggatataagaagatgaataataagaattttactcaaatcctttctatgagtttgtagcccataaaaatgtttaacatttaccaacactatatcttaattatgttaggttatctatcacaacagaataatttccaccaaatcaggtcataacagttcattgattctttgtaacaagaaaaatgttgtttctactttctagaatgggatacttgccctttctagagttctgtaagttctactttggttcaaaagttactgattagttgcaaaaatggatgcagggatacttaaattgacatactgatttgcatttaaatactaagtgactttttaattcaacaatttcgtggccgacttgtatctcagcttagaagaaatctgtcatttggtcattctggcaaagatttatttatttatttatttatttatttatttatttatttatccttttgcttctttttgcatttgctggtggtgttcttcttcataattccattattaatactcctcattcttaatagtatatttctttctattgactaaaccaagagctataaggaagatctttcctaaaatttcattatctaaaatatttttaaaactttattttctatgtaactttttaggctagggagtttaaactgagtacattctttgatgttaatgaaacaccaatttttctgaaggccatgtagccctaatgagcagcttcttataaaagaacatttaatcaaggtttatttttaacttgtttaaacagatctaatagtttgtgctgatttcatttcagtataataattgctagcaatcctattagtaagtcctagtacagggaagttaacacaaattccaatctaatgagagtggtgtcacagcaaaaaccatgtagtcaaggaaagatcagtattgcactggagggaaagaggcacctggctattctgtacatagttttgttgccataagtctttgagttctgagttacttaatgcttacatggaatttactagatttagttaattcagtttcttatggcctttaaaaggcaaaaaaacttaatgaaaacaacacctactttagggggacgttctgagaaaataaattacgttttctacccaagcacattttggtacacataattttcttataataaagcctattatgtcacttagttttaatttgttacaagagcatacataaaaattaatctttaaatgcgttctttccttcttgagcttcagattgaagaaaatgaaatgttactggattacggggcatgtgaataatataactgatagaattaaaggatgatttaagactagcagaatgatggataatttcagctgatattgtataataggataatttttaaaagaggtgacaaaatagtctgattaagagccaaatattttaaataccgttaacttactattagaattggtttaaaataacattgttgatactttagactgttcggtgagtgtgaagatttcattgcattcaaaaatgaaaacaagataagaagtaagactctggtagagaaaacgtacgaaggcaaggatttcaggccttgtaatgaaagtgcatatctgccaagttcaggttataatcttttaaactttttattacttaatatgacacagtgacatttaaaatatggagaaattgaagataaataatatggagtgaatggcagaattgatttaaaattttaaagctgtactaaaagtattctaatgcactgaaggacatttgtaagttatacattgtttataggtttctgatgagaatcccaaagcataatgtattagagcttgcctttgccatgagggcaaaagaatattgtccatagaaaatagtggatagtaaaatttagcctctttttttattcatgtaaatcatctgctttttgtgaaaggtttttatgcataagatcatgtcacatattactaatttcaaccaataactgatatatttggtcttctggaggatttctttatgagattatcatttattgttctaaaaagttgaaattagaataacgaatgctgtgagaactgtgatttttatactctcagtacagaataaggagtactttttcacaatggttttaaaatcttggtatgctgataacttgatgatttaaaagtatcttttactacatttggttaaaaactgtctgatatacaatctactatttttcagaaaagtgaccctcacaaagtgcacatgatactcaaccaaggtgcttgataacaatgtagatttattggtctcatcctggatatacttaatttctcactctaggagcagaacctggaaattcttatttttaatgaagttccacaggtgtttctattgcacacaaaagtttgaaaactactattttagagagagtgcaacacttcataggctaaatggaagggtctatttttggcactttgttagaataaacctagaagatttttagtgtagagtttttatatggaatctttaatgtggttaagaaaaaaaaattataaaggcatttgtagctttaaatatgaagagtatgtggtacatagatgacaaatttaggacatctttcacagatgctgtatactcaaatgaatcatgtcatctggctcaagttgctattctatcttaactgcaaacaaactcacactatttgtactgaatgcttatacaagttgcattctgaatactaagttggcatgtatttacaaatctgagagaactgctatgtttaatgcacaggttgtcatagaaactaattaacttttatttccatgtcaagataaagtagtgtaatacagatgaaaattgtagcaaaggaaatagtatcacaactaagagaaaaaaagctccaagactcagaaaatgtgcaatcaaaatgcgtgatgtcaaataactcagtggtggattgtttttaattctgcaaattatgatgttaaaaattgtacagacagagtccacattttcctagagctgtttaagcaatttaaatggaatttggcaaacaatagatttagtataacatctatcaaacaatgccagaaaagttttccagcttaaagattattctgtatttatttgagctgccttattttgttctacaattacctgtcttttgaattagagaagaaaaaatatgtcatccatgaagctcacagtgtgctcagggctgtagaactgtaactgcaacacttttaaaaacatcttatttatttgagagcaaatattaatacatttcatacttttttccagtcacatttgttgaatatgttttcatcataagaaagcaatacacccttctgacataggccagagaggaaagaaaagaaaggcaatctgtaagaataaagcatgaactttcatcacatcttggcacatcctaaaccttcctacctgcagtaagctttctccctggcctagtcattagagaaatcgacatctttttgtggccttatacttgttccaaaaagtgaggatggaaagtaggtaatctatgagtcatctttgttttgattatggcatgtcttattcaaggagagtgacgatgaaggtagaattaatggtgaagaatattaaaagaaagaggtcaagtaatgtgattgaatcgctgggactggagagacaataatggggcttatattctttaaatgattttaatgagaatatacttaacattctgaaattctaattatatgatagcccatagtactcttaatactactaataataggaaattgcagaattcaatacgtaaaaattaaactttttaaaaatgctaaactttgcctatggagctaaattatatcttattttaaaatattgcttcattgctacttataatatttttaattatattataaaacatattcttctcatcccactgaaacttatacagaaggaaaagtgttaaagggctaggaaaatattatttcatcatttctgttccattagaattcacttgggtggctgagaaaatggtttatggattagagagggaagaacaagctaaaacatttcataccttcatctctgataaattccccaaactcattctttgcatctgagccataaataacaaccatgctttttgctataaagagctttttgcctacaccaggtcttttgtcttggagatgaatgctataataaatttggagtcttgggggggcattgtttgaactataacattatggtttacaactgttgcttctatgatgaggaggataaaaagcgactgtgaagcttgatctctgtcatagaaatggattaatatttcagtcttcaatatgggtcaagtgtatgattctccccaaagcaattcaccatgattaatttttattatgtggtcattcagattctctttatattcttagatattttattcccccaccaaatcgccccttgaaatactataacttagatttttcacataatagcagaaacacaagatttttagattcttataacagttttaataaaacctcatggaagaaacctctaaagtgttttctcaaaaattatatgaataacttaaataatagtagaaacttaaatcattatattgataataattaatattaacttaatttattgataaacagtgttaaatatatattaattgcaaagtaatatgatgttttaatttgccaatgactaagtaattaattattaggaaaatgtactctgtcactggggaaaaaatggcagttgcataaagatgtagcttttaaagtcacctttttctgaggagaggagggtgttaactaggaaaacaagacctctctgttgtctttgttatctttatctagactatagtttttcacatatatctgcaagatgctaatgagtttaaaactttgggggaaaaaaacttttttggcctttaattaagtgagagctttttttttttaagccttttctcaggaggaaactgacacattttatgtgtaaataatttcatgtattgaaattgtttttttcagtgctttcattcctccctttgccctgcaaaatttaaggaacttcaagatattaattttcagtgcttacattaagaattcctacaaagtacttataagagcaatcaacaagtcttattcaattatttattttacaagttattgttggcagtctactgactgccagtcatgtcaattgtaaattgaagggagccatgaagctgtgggaagcccaaacattccctacagacaattatatggggagaaatagttacaatcactgggatcagggctaatggaggttacattatgtttggtacaactatatataatttagttttgctaggcagtaggtctcaaacctggctacaccttagaaaaaactgggttgctttaaaaaaattctgatgcacaggcttcaccttaagaatctcaagagctgaatgaagcccggccattggaattttaaacatctccacaagtgattatagattctaaggtacttaaaggctacaggtgacaacctgaagagaagagggtacagatggagaatgagaaggagaggtgagtaggaaatttaggggaaatagtaaataatctttttgaggccaggcgtggtggctcacgcctgtaatcccagcactttgggaggccgaggcggacggatcacgaggtcaggagaccgagaccatcctggctaacacagtgaaaccccgtctctactaaaaatacaaaaaattagctggacgtggtggcgggcgcctgttgtcccagctactcaggaggctgaggcaggagaatggtgtgaacccgggaggcggagcttgcagtgagcagagatcgcgccactgcactccagcctgggcgacagagcgagactcagtctcaaaaaaaaaaaaaaaaaaaatgaagaagaagaagaataatccttttgagcaacagcattagatttagaccgactctgtttcacatcctggcttggtcattttcttattccatgactgtagatgttagttgttatggaaacattacttataaaactgggggtcttaaatctcacttcctaggattgctagaaagagtaaataaaatagtgtatgaagacatttcaacagtgcttggcacatcctatgataaccatcattattactgtttaaagatggctggagaaatgggcaggaaccagataataatggctctcatttattcttgtgtttagatttttatcttgaaaagaatgaggaaatatggaagatttttaagacagtacattacataacaaaatttgcatagtataagtaagactctagcatcccattgtgggacaaattggaaagtgtactacaaatggaggcaagaaggctagttagaagattattataacagtccctgtggaaaataaaaagagcctttactgaaacagtgaccacaaaaatggggaaaagcagatggacgtgacagtgcctcaaggggtagaacccatggaatttagtcacagattagaagcttgtgggtaggcaaggatagatggaacaggtgaaatcataagttaatgtcttccaaatgcctggtttgtatgacttgatggatggtgcaacaggaagggaatacagaatgaggaaaaagataacaaattcatggaaatgttgcacttgagataacggtagaataatcaggggctggtatccagggttagtagactgtattggtatcagtggggacccctgcttacctcacttgaagattggaaattggaatgaatggaactttctgggtataaggattttgagagacaaggaagagctaaagataaaatcttgagtaatatctacttttaggaaagagtggagaggaggctttgaaaaaagggaagcatggttaaaatgtaaaaagacaataaattacattgttttaaagtccaaagtccaaagaccaatcgtatatttcaagatgtaaacagttgtcaagatgcctaagaaattaatctgcagaagagttctcctaatggatatgtcatcagatatttaccacattggcataccttcagattgtaaaagtaaagaagtaaaataagagcttttgcattgtgcatatatttattgagcatgtactttgagcacagcagtaggccaagcaattattagatatggggagtgaaaacttacgagacttataccctagtgaactacatcccaagacaaacagcattctgagacttcatcactgcttccacttatttttaatttagaaattttgtgggctgtttatgttttcttttctttgtgcctttattgaatactttatctcatttataacatttatagttttatataattaaatgtattataattcttttacaatttttttatcctaatttaaattttttaatatgggctctcactttattgcctaggctggaatgtagtggctgttcacaagcactatcatagctcattgcagccttgaattcctgaagtaatcctcgtgtctcagcttcccaagtagctgggactataggaacatgccgtcacacccggttaactgtactgtatttctttgagtatgattgcatgaaagttttccaatccctataattaatatagcataagttagagctagagaccttaaatgttgtggtgagaataatattagttaaaaatgaagtgcacataaaggcaaataattattgttattatttataatgataatgatattctttcttatatcacccatattttagtgtcataaaccctgatatttgctctacagccatttatatttatatcctggtacccaagattgttgtgcacaagttgatattcaacaaatgttcgttaaaaatacagataaatgaataaaatgttttgcaacatggcataaaggtgggcattttgcccctggatgttattaaaaggtgagtttgtataacaggtccaacagttgcattaaatctgcaaacatgtgttaattattttgaccagtgttttctgctgagcatgtgcctttataaatgatatttttgctactttaattttaatgatcgattaaaaggtttactaattgcaaatgaaatcttctgtaaaaaggaatataaatggaggaatgcagagtctcacattaagattagaaagccaggtgcagtaatgtgcacctgtagtcttagctacttaggaggctgaggtgagaggatcacttgagaccaggaatttgagtttagcctgggcaatacagcaagataccatctcaaaaaaaaaaatcagggaagagctttgataagatattaaacacataaactattccaaccaaacaggctgaaacacagtctgatctcttagcttttatattttaagtaattatcatggggtttgagcatttgtgatcagaaagagatcttggaaataatctataacaacacctgtaatatcttataagcaaaaatgagaggcagtgtagcaaactgttcaacagcacagactttggaacccaactgcctgaatttcaaaagtgactttgatacgtgaccaatgatataaacctgaatttattacttcatggctccatgcctcagttttataatctgcaaaatgaatataaacatataatacttacttaataaagcagtcataaggaatcagtgagttaatatatgttaaaatgcttcaaacaaaactagcaactaaataaggtgatatatacatgtgaatgttgaggatgaagattatgacactgatctcagagagtgttaagataccagtcaaagcaacatacatgggggattattccaatatatggtgtcatttaaacttgtcttcccatatctgtggtgcaagccgttttatatgccagtgatacgtcacttatgtttatttgcatttttacatgacttggaatgactgagaaaaaactacattattaaattggtccaatattaatagtaccaaattttaaatttgaaggtaaattttgaaggtagtgtatctaccacttagatgtacattcttttttttttttttttttttttttgagacaaagtttcactcttgttgcccaaggctggagtgcaacagcgcaatctcagctcactgcaatctccgcctcctgggttcaagcaattctcttgcctcagcttcccaagtggctgggattacaggcatgccccaccatgcccgggtaaattttgtgtttttaatagagacggggtttctccatgttggtcaggctggtctcaaactcctgacctcaagtgttctgctcgccttggcctcccaaagtgctgctcgcctcggcctcccaaagtgagccaccacgccggacctagatgtacattcctaaataattttttattacatcatattcatcattttcttcatatcacttactcatatgtgacattttcttgctcactcatttgttcagttgtagagtaaatccaacatggcaggaactttgcttgtcttttcacacctaaatgtcctagtccccagaagagggactaagacactgtaggccttcaataaaacatattgggtgaatgaatgtcatagactgtgatccagcgatatgggcttggcatgggggagtaagtcgatttaagtgatactgaactgatagtgcatttgtatacaatacttgactcaagttccagcccctaccttggaccagttattttacctcaccgagtcttagttttctggtctgtataattaatacaattaacataacaatacagactttgaggttgtagtgaggaaaaaaattagttaataattaagtatacatagcaggcactcaattatcaatattattatcagtattgctagtaacactcctagttaaatcatccacatttttgatagtttattaatataaatattatctattaaatcacccatgttttagatatatttattaatgaaattaataaaatagtgttgacaatatcacatatggctttatcttgatagtaatataaggatcccctactcctgattttattatacaaattataaacaccatcaatagtttaagtccttgcttatcaaagtatggctccaggaccggcagaatcagcatcaccagtgacttaaaaatgttagcatccaggccccattccagacctactggatcaaaacctgcatttaacaagcttccctgcctgcccaaccccagatgatgtgtacgcacattgatgtttgagaagtctgtgtttcaggtgatatttttaaaggctagtaagtatttaagaatcccataagaaagggaaaaatgcaaatattcctcactaaaacaattcatctcgcttcctacttgacgatgattttaggacaggagaatatagtattgtaaaattgagaggaaaagagaagaagtttatagttacaatctacctataggaaattttgtcttattgcataacatggactcccttttgagtcagcgcttataagtacaagcaaaatggtgctattatacacattgtaccctctgccctatagagtgaattacaaagtgtgaaaatataatgactactaccgggatatttaataagaaggataaagtaataatttaagaaaaacgatttcctgagagactaaagattaggattaaaatgagagttagaatagcatagaggtaattcaacatttgattaaggacttaatctacttatctttattcaattcaagcttttttttttcaaattattaaaatttggtgaaatgagagttatttttagatgttcttgccccggagtaaaagagtagtagatagaggatataaggacatacaagatgaaggatttaagataacattggtgatagagacaatggattatgaaaatgatcactttatattctgtaaatttcctgaattcaaaatgccatatcaaaattctctgatgtttatgaaaaagaaaagttatagtggaatgtgctaagtgtgtggatgatgggtagtgaagatgatgatccccatgaagagattggggtgaaaaaccaagagaaataaagagagagagaaaaaagacacatagaattttgataactgaattgtatttggaaagataaattggccaatggcactgaaaaagaaatcctcaccactacaacacccttgagttcataaatatgccagtatctattttttcattattagtagacaaggctgtgtcctttcctttgatgacggtaacgagttctatgacattgccactttgagttcttgcttcattagattgggtgactgtttatttgaaattgtaatgaaatatttactttatagagctataaggattaactgtgataattgagtgaggctgatctggagctttcagtgtaataggtcccccttgtttgaatacagagcgcagtgagaatgaacgagcaagtgagtgtgtttctgcctgtcactttctttctacatgttgctttttcttctggagataagtgggcctaatgctgaacaaatactggaaatcagaagccactgagaatcattcgcctctcgctttcccatggcagcatgatagacgctcaatcaaagaaccccctcctctcagcaaagcaacaattttgtcaccacgagcaaatccaattgaaaagtcccttggactgagaggagaactccagttgtcagaatcagcaaacagaatgaaaagaactaagaggagtaaattggcacctggggccgccgtggtagcctgtgataggctgtggcattgtgttgggtagacattcagccattttcagatataatgggagaaattaatgcaaatgagtcaatggaatgaaatgcattttaatgcagatttgagggactatcctgaactgcttgataacaagtcgctttaagaaaaggcttacattgtgaggactcattttttccccatttcttctcactagtgcctcataagggccctttgttctctaagtaaactctttctaaactattgacattgctcatttatgtgaatttcagattttttttttctccctgacaaagtagccttgggtgatctgggaaaacgttaattgcaagaggacaaggaaactggctgaaacaagaaatgcagtcattaagtgtaatgttgcagttgtccatgcctcattataacatgcatacaaggcaataaaatgcatgtttcacaaacaaatcttttgacaactatagttcaagagcctccagctgtcctgcttttttacatctatttctcttggtttagtaatcattattgaagctaaactttaaattcccagaacagtccttcatattatgcaagaaccatgaagatattagagttaaaaattgtttactttaatatttaaaaatatttgctttccaaagttaactggaatttctcactaatgttttgttttgaaaatgacacttaataatagtgagggcagcgtgggggttggggggaatgaacttaatcccaaaaaaggcactcttttataaaccaatatttaaaatatttagctcccttaggctgtctttccatgaagaaaaaataaaggcttcatcttccacatttaaggtcatgatggtttcactggactataaatgcctatcttttttttttagggacaaaaatagttaatcagatgaaaaggtcatcaagtcttagtgcagcttaaaactggtgaactgtcagactctcaagtaaaagcagccagaaaggggaaaaaaaggtaacagattcagcattgtccaaaagttccagaccagtgattaatgtgtaagataatggacttgggaaatgagtaaacactccccatgctccctgctttgtgcttgaacgacttgatgacaagggcagagcaaggtgagaatttaaacaggaccacaggaaaaaaaaaaaaagacaaagactggcaacaacataatgcgagggagggggagtttactggtttgcagtctaaaaggtacataataactttcttcaaagcaggccttaacagtgtactaatttaaacttcaacatgggcatggaattacccgtagaaattatatgccactcagtcatcttttaatataccggatatttatatgtacttgttttcatttatttgttgttaacttccttcggcagacccattaagcatttagatacatatttgtgttcagatgtatcatcctcagggaaaggagatgctgtattttgattaagtggtgcgtttcaaggtatttcaagctattcttaaataattatataggcacattttagagtattcctccataaaaaaatatttgaggatctggatgccttgctagctgtcgcactgcatttcttagcaatctgtcatcacttgaacttacacttttcttgatcacattgaagaccttttatatgtataaaacatttatttactttgaataaaacttgttttgtttccaggttctcactccctgtatttctttagacacctacagaggtgttttccagggatctctttttataggatcagtagcttaaacatgttaattttgtcagtcttttacataaaaatctatttctgctctgtcaatctgttttaaatgcacacatcacaactgacacccactgaggatttatttgtctctaaaaaaatcctgacaatttctctggacaaatgttacccatcaccttaaacggtgcttaatgaactttgagcaatggccatggagagactgtgttcacagccctaaatctctatattgttgtcaggtaatcaagtcttcggtggtcaatttaaaaatatttgaaattatcatattggttctgaatacaatattcatcatttttcttttaatcatagagaggtttgtaattatgtttatgtatattttgtaaattaagtccataatttaaaaaatcttgatattgcatcttcctaaaggcacttcagtgattcaaccctgaaaagcatgataatacagaaatgccattgtgattatcaacaactggattgctactttcaaagtacctttaaggccaggcgtggtggctcacacctgtaatcccagcacgttgggaggccgaggtgggcagatcacctgaggtcaggagatcaagatcagcctggccaacatggtgaagccccatctctacaaaaatacaaaaattagctgggcataatggcgggtgcctgtaatcccagctactcaggaggttgaggctggagcatcgcttgaacctgggaggcagagattacagtgagccaagattgcaccattgtactccagcctgggcgacagagcaagactctgtctcaaaaaaaaaaaaaaaaaaagtacctttaaaaattctcttggcttttcaacaacagactggtgagattggcattattacacccatttctgtgattaggaaaaatggtccctacagaggttaagtgatttgttcaggttagacaacaaagactctacagagccatttggccactggtccgtttattttactaaagctccaaagaaaatgcctttaaaaaaatcaagttatttccttatattgcttgtgttctagtgcttatggcatttagggtattaaaacagtttttcttaatttttcttttgatcccaagtcttgaattactatgtattgatttaagtgatattttaacatttaattgaatgcatgtttattatgagttactgaggcataatattaattattcaagctaaataaactatttttgctttatgtcaataataagccctttcaaaaatcttcaaacgtgtgttacatttttattaggacttttaatacatatttctcatgttttatgcattgaattgtacttaacaaaaatcaaacagtcacagtatatgagttttttgttacaaatttgttacgtgagccatcgtttctcctgatcctttacattcactatgtcattctcacaagtgaacaacatccaggcaagcatatatcccaatttgacgtctctatgataatcagatattcaattctgcttgatttaaagcaaactttctatatatactgagagttatgatttttcctttagaaaattgagtggatttcaaattttgctattaaatatattttgcttctaaaaatctgaatttatatttctactctaaagatgattgttttgtattataattataccattttatatcagtcttcctcattagactgtgagttcatccagttagaggaatcctgccctatctatcttgacctttatttctgtgattgccaatacagtgtccaggacatagctgccactcaacacagtatcttttaaaataaaatgtttttttttttcattgttttgaaaacaaaccctaaaccataatataagtcctttcaatattctgagaatgttgaattataagttttaaaaggataaatgagggtggatgttcaattctctgaaccctggatttctaggaaataaaaatgaattcctggtagatggggtctaagtatacttttaaatgtcttggccgggtgcggtggctcacacttaggtaatcccagcactttgggaggccaaggcgggcagatcacgaggtcaggagatcaagaccatcctggctaacactgtgagaacctgtctctactaaaaatacaaaaaaaaagaaaaaaaaattagccgagtgtggtggcatgtgcctgtagtcccaggtactcgggagactgaggcaggagaattgctcgaaactgggaggcagagattgcagtgagccgagatcgggctaccgcactcctgtctgggcgacagagtgagacttcgtcttaaaagaaaaaaaaaataaaaaagtctttagtttacgcattttagtctttaaatttaaataatttaaattttctagccattactttaatatttaacattttttagtattttttccataccgtctcagccaataaattaatggtctatgatgaatattctctattattttggtatagtatcataagtttaaaagtaatggtttccatatatttgttgctaatgctgtgattaaaagaaatacttttagaattcatgtgaaaggaagagagtaggcaagggacagacttgatttagtttgaagacattatacaagtctgtctctattcttagatagtaatttggggaaagtagtatcccatgttcttaaagatctatgtgaagaaattgatagctacatcatttcctcttaatgtactgaattaaaagttaggatacatacctttcagactaggttctgctacttagtagccctggaactgtctgaatttcaggggtgccatttgcaaaacaagacaaattagacctaacttaagacttcctagctctaacaataatcttgggaccttgggacattgactgcagaaagaagagatttaactagctttggtcagagcaataaaattaacaccagtttcgtctggcccactgatgtcacaatttaaacttgaaagagagttctgtgaaaatagcttttcatcaccattgtttttctgattggggtccatgtttaaatagctacctgtataacagccttgtattgcagctttaatatccaaaatatctttttttcctcaactcatgtgtgatatattaataaaattctcataaacagatttttcttgttttgctatacttgattgaggtctgctataaaaaattaaagctactaaaggtggggagatatcggcaactctgttgaacactgctattcagtattagccaagtggagtgtttccaggcaacatcttagtatgtagaatctaccctgaacatgataaaataaaactcatagacaaagttaatgatttttcttgttaattttcaaagagaagatgaagagataaagtagtttatgatgatttccccccggccccggtctttttgcccatctcctggataaaaacagaatgatattaaaagcgatgtgacccaaggaagaaatgatatttaacaattcataacatacttgccttattattctacctctttgttttttattagactctcctgcaatgcagtgaatcaccagatagtggcgttttttacgttttgcagagttgtgcgatatatttgtgcctttttttttttcctggttatgtctaaaagatataatttggcctacatttatctttaatggaatattttttgagaatttcatgaaatactttaggaaatgtgagacaccctggggtattacaaaatctgggctggaaatcactggcccagagaatggttactaaagtctgacagctgttgggtcaacgggctaagccatttaacctccataaacctcattttcctcatctgtaaaacaaaactcttagtgctgacctacttcatagttcaggttggcagcagctaggaaaatactgagagtcatcatccccttgcaaagtatcaactcccatatcttctaaagactgtacataccatagtacagatacttgattgcatagcatgaaagggggcaaggaaaggtaaattattatttgtagttggacaggagccaggaagcatatctcatatttttagagatattaattgggagtatctatatccagagccatgggcgatgccagaagggaaatgggcacgatcagagaggaagcactaaccaggtgagccagctgtgaattcctccattttaaagcactaatagaacagtctggaactttgcttgaggaaatacatatttattttgctgaaacaggatatgaaaaaaagagaaaatggaggaaaataaaagtaatactccagtggatgatgtatagagtacattaaaaaagataatcatgagtcacattaagtcagaattaagctgcttctgatttagtatgttattttggtttctctttgcatctgtggcctgaaccaattaaaatattttgaaacaataaaacatttggtcatttatactttgactatggcatgagaattactctatattacttttgtatgatttgtacacatggcaactaatatttcttgtatagtagtttacagctcttggcagctttaggggtagctgatcacagtgactttggttttaaaaaggaaatatggaataatccaaaaaagaataaaccattgcagataattgagaattgattatatttcacacactcaaaatgtggaaagttctaaagtgctcttccacttgcgaagcaagttaggtaggctggtagtgaaatattgagggcaattttcttcatactattactggaacagtgtcagcaaggcaatctatgaatgtttgtactttttcagacctggatatactaacttcgttatttatatatcttggtaagcgataaatgaaaaaggcatttaaaaaacttgcatacttctttaagtgattacatcttcaagcagatgttaaaataaggattagcctttttttgcatgtgatggtgcacgaaccttttaaggaatctgtgaattattgctttggttcagcaggagtgcagtaagaagaaatgtacctcatctgtaatacactgtgtagactaatatcagctccttttttcttatattgcagcgagatattgatctggtaaaatggtaccatattggagctgtctgttgtggtattcatcatgctgtcacatccctagtgccttgaagttattggaaagtggaattgagagagttctgtcatttggtgtggcaatccattcacaggacagtcactacaatatttgcagtggttcgcttatttttctagccaggatagcttcacctttagtaacaagagggcctttctattatcccatgcatagtggtattaataggttaggtttaactcttctctggcttgctttccttgtgtatcattgctcttttctagtcactgctcacacctgctgcctgtcctgatgctgatgtattgggcttatttctgtgggactagtatatctgaactgtgacttcaagtcccttatgcttttatctgacggtggtgagaaggcaaaagatgaacttttatatgtagaaagctttagtttcttcacacactaaaatatcagttaatgttaaaagagctttcaaaatataaaaagatactgtcaatcttcaatgactagattaaggagtttgaatgaattatttttgttttggattcttgctggcaacctgatgattttagtagaatgtcatgttttcttaaaaaatcagaaatgacagattttgtttgggggaaataattattatctactaaagagtgttaaagtgtataaagtgttgttaatctttagaaagatgagttcctgaaattccaagtaataataatttcagctatagctaagtaactgagcaacagagagagagagagagagagagagaaaggaagagagacagacagagagagaaagagagagaatttcctggtttgtaggaatttaaatgcaattttaaaagttgaataatatcaaactaggttactattttgatagacactaatggaaaaattatggctactagaaaccaagactatagttctttggagaaagtatatttttaaaatcaacagttgaatagaactaaatatgcaaatatatgatgtatttaatgtacgattgtgcactattgttaatacacattcacagcatgcactgtaatagctcagaaggagctttcagagcatttatgagctatgacatgcatttatattgagttatccgtatgttttctatgctaatcttaaaaatgtccacttatttgctgttgcttcaggaggattaaaacctctgagaggatggcatttcagtgacttttctattctttcattagtcagtatttttgtttatatcacacttactataaaggaaatactaagggactcacagaatcaagagagattttttaaaatttcaataaacaatgccataaattgggtgatacataatagtagaattcacacataaaagtttttaaataagtagcaaagcagtaacaaatattgatcacaaggagtgtataagtttttgtagaaatactaagttctcatttcagtgacatatttggcttagtttgcattattgcttaatatgagatgaagcatattattttaagaggtgagaaaaccatacaatctaatattttgttgacatatttttctattatttaaaattgttagttttttactttttactttcatatttactcttactcctgctagatatttttcagaatgtattttcattttagatagtttactcatactacatcttacatcaggacatgctagaggtgagggtttatttctggtgaatcaacatgtaagatgtaattataaaataatttctgtatcccattaagaatttagatcaacaatatcttcaattattagacagggcagaattttgcaaagccattattgtgctcttggtattcactagaatggacagaaatagaacatcactgtcctctgtaaacagtttcaatttgatctgtgtacatgataaaaatcttggcttctcaatgcatttaggtgctgtcatagctgttgttgccaaataagaatgcagtgtgatgttattatagtaaacagcacttaagcacagctggcagaattgatcagggccacattagagtgaacttcaacagatgactgacgcagcagaaacaataactgaatatgcaaacagttcttgcagtgaatgctctggggatcaggcaccattatttttgactttgaacagggaaaaggggcagatttgtaacctccttccatacagaagggttctgggtattatgtaaacatctgactgccatttataatgctggttagttacaatgcaaaactgaagcctctcctgactatttacattccattaattattaaaggagaaaaacataaacatcagataactttgtttaatgtttcacataggatttattttttttagccatcttttctcaattaatgttagtcatcaagaatttctggtttaacttggacaacaatgtgtgtgtttcattgatggctcccaccccttcccctaattattacaagagctaattatgtgaactacatattgctgttttcttattgtaatgattgaatcattaaaagtaagcagtgtagaaatattagataacatttattcatgatatttcttttattcttggttttaaagtcaatttctattttgctaataactaaaaatatcaaaaagccatgcatggtagtgaggacaattaaattaaacaacactttcatttcctagttcagcatttatttattgaattctaaagaaacaatttgcactttaaagcaatattaaacaattattcttataatatactctagctaagacacatattaaatgaaatcatacattagattgttattaaagggtacatttacttgaaatgctaacttttctcattctttttgttagacccttaattctgttgtcattcattcatttgctatgtgaatttattaattaaataaacacagatgtggcatttttgcggcagtgtaaggtacagtttcttagtccaaggattagggaacaattcaaaaaaagcaattattgcatggtagggtaagtggttgctactggcatgcaaagagagtgtatttcaagaagctcaggtatttcagggaaagttttctagaggagatgatgttaaagtatagactctaaacatcggtatagtggagtggggaggagaagcaggggaaaggaggatgttccaggcggagaaagagcatgagagaaagcaagctgttaagagtgaatgtgacagaatttttgaactctgtatgatatttattcccaacagagtacctggcacatagtaggtgcttccataaatagttgcttgaaagcataaaagtttgagataaagacaagtgtttgtttatttttgtctttaacttggctttcacaactggtggtccctttcttcaatcattcctctccggatcctcagctctccgcttatctagctcttacctctcaccctcatgatgcttgttttcaaaatggagacaataatgcctatagcatggagttgttgtgaagcttggagatgacggttacggaactcgtgttccttagtcgggttcacagaatggtataaacgactaacagtttcccaagtgttgttcctctctacaatattaacatttctttagtgcatcatgttttaaatctgagggatgattccttaattgtgcacttaagggaatgcctgtaattttctcatttgaaagaggctgaaaaaggtaaatttgtcaaaatattagtaataataattatgtttactgagtactgactctgtgccaagcactgtgctaagagctgggatttgcggcattatccatcattcatttggtgtatcagcccaggttttatctgatttgttcaactttttcttaacaaatgcccccccctcaaaaaaaatctagtgtgttctcaaattatacattaaatagaaattagtcattggatatttttaggcaaattaaaatcttcataatttacacacaaagtgcttggattttggattggtgaacagaaaaatatagaaaatagggccaggcaaagtggctcaagtctgtaatcccagcactttgggaggccgaggcggtggatcacttgagatgaggagttcgagaccagcctggccaacatgctgaaaccccatctctactgaaaatacaaaattagctgggcatggtggcaggcacctgtaatcccagtgactcaggaggctaaggcccaagaatcgcttgaacccagaaggcagaggtggcagtgagctgagatcatgccactgtattccagcctgggtgacagagtgagattccatctgaaagaaagaaataaaaggaaagaagaaagagagagagagaaagaaagagagaaagaaagaaagaaagaaagaaagaaagaaagaaagaaagaaagaaagaaagagaaagaaagaaagaaagaaagaaagaaagaaagaaagaaagaaagaaagaaagagaaaaaatattttttatatttcaggtaacatagagaaaaattagtaaaatctaatcatgttatgaaagatgatatattagttaagaaaatgtcccatatgtttttgtttttgaaatccttacattattttctgagctaacaaataggcattgttctttgaaaacatgaaaagcagacttccagttagcttatacagggcagacacctcaaggccctgggaatgaggattgctatagtagtagacaaagagggacctgttgacctttattcaatggtgcccccagagtgagctcaagggcaaaggatgttctggggatgatggaaaataagcaacaggaatatcattctagcgaagcaagcagaccctccactgggttcccttaaattgatttctctttttaaaaactaagggcttgagcttgttttattccatctgtaaaatgatttccaagcacttttttatctctaagatctctttagctgccactcactgtgatcagttttggccttatgaactgaagtgtatggtctcaaagttgtattccatgttactttatttatcttagataatgtcccctaccactttttgctgagcagagacaatgttaccctgcttcactttgctttccccccctcaacattgtttggagcttgctccttttttttttttcagatcccaatattaacagagcatgttcacaacgtgttaatctgtgtgaatacatttgtaaagctggccagtaagtaataaatttgaaggttactttggatgggaaaagtattctaactgtacttaatctttttatagttggaagtcaacatgctgtcccccaaaggtctctccatattgctttttgcttttcaccagattagatggtttatttgcctgtcaagttcatgcacaaactgggcaagaccttcctgcacctcaggaatgtgagaatggaccagggtggtctccaaagtcctacctatcggtcctgagaaagctgctacagtgctatacagggacccattaggacacaattcattaaaaattcccagagaaaggaggctaggatggcagaactcagatttccttgcttcctcccatggacccagtagagacactctcaaggtaaatgtagctcccaaatttatctaaaacaaacatgtagtgaggaaactcacagaatctcctagagcatccttgtatggaagccagcctgggcatgacatgaatgcatttttagctgggatgcctgattttcttttttctggcagggggatggagtctcactctgtcacccaggctggagtgcaatggtgcgatctctgctcactgcaacctccgcctcctaggttcaaacaattttcctgcctcagccttcctagtagctgggactacagaaatgcaccacctcacccagctaattttttaatttttttagtagagacagggcttcaccgtgttggccaggctggtcttgaacttctgacctcaagtgatccgcctgccttggcctcccaaagtgccaggattacaggcatgagccacgacgccaggcctgggatgactgattttaattattttttcttattaattctgtacagtgtgtggactacattacattacagtgtgtggactacattacatgatctagtattaactctcatcattgtgaacaattttgaattgtaggtaatttttcctataaaaattaccgttcctttgcagaaaatagatattatatatcatacaactatttgtatatacaaacacaatatttaaatacataaatgcaaaaatagttgatagatatagctattatgtgtcagtacatatacatatgtgttaatacatatgtgttactacaagattatgtgttagatattgtgttaatacatatacatatgtgttaatacagaaatgtgtactctatcaagctgaatatttttggcaggaaatatttaccacattgtatttttagtatatcttaaaatatattaaaataaatacattcactaagtcgacatagctttgacttatacttagtgaagacattagagaagtcctagccacttctgggaaggaacccagaaacttctctaaccttacatgagcaaccagtgaaggctggcaccagtagctcataagcttgattagataacacaggtagcctgcagatactgtggaggttttttgtttgtttgtttgtttgtttgtttataccatttcttttatcagagatgctaacactgagcacagcaaagaataggttgctggtgctctgggggtataagaggattccaaacaggactttagtggtaaggaatttccagtgacctgggaatttttgtagttgatttcatcttattaaaatcattatgccttttttagtgccacatttaaaaaacatattgcagttaagtgagtttacttttcatcagtgaccaaatctgaactccaaatgtgattgatttttgtattcttaaactctaagcttccactttgtcatctataaagggaagagtttaatttcaacattttcttccattcctatctatgggtttcctcttcattcatgtatattttggaagaatctttcttgtacatgatgttgtttattattttattttattttatttgaaacagggtcttgctctgtcatcaggctggagtgcagtggcgcaatctcggctcagcgcaacctctgcctcccgggttcaagtgattcttctgtctcagcctcccaagtagctggggttacaggcgtgtgccaccacgcccagctaatttttgtatttttagtagagaggggttttcaccatgttggccaggatggtctcgatctcttgacctcgtgatccacccgcgttggcctccgaaagtgctgggattacaggcttgggtcaccgcgcccggccgcattatgttgtttattatgatgtaacaattacttttaaaaaatattgtcttatctcttagtaagtatagataactctaatgttttgaggtgtagtggtggaacatggtaacccctctaggtattttccctgcaaaagccctgcagttttattgggattgagtacaccgttttgtttgcataatggcagttctcagtgtagtcttactccagttggtgaaatgtaaagcaccactcactttgtaacattgtcttttgggcagaattgcacagttatacaaagcagttacatgatgttcttgtttggtgactgtttctccaggaagattcacattgaattatttcttaatctcgatgtcacgttttgatgatacagcttagttggtggaaacctgaaatctgtgaagctatgtttcatctagccttctgtgccatgccattgcaatttagacatccattagaatttatatattatgatagtataatgcaatttgcatattcaccaagtagcaagaaattattgcttttcttccctttgatactgtgaggtcatatctgacatgcatactaaagtttggatgataattatcttttggagatgccattactgcagagcatccatttttcaaaggtatttgtgtgcctattacatatgttctcatgataatgaacctgtagtagaactttaaaagaaaagaaggggaaaactaaagtggggacagatgagttctttaataactaagagatttgtggaaagaaatagtagacagagagacttattttgaaacaaaaaaaaggaatgaaaacaaccctttataatattcagtgtcacatagtctacaacctgattgtataaatgtggtttcatttgattttcacagcaatctgtaaggcagatgatattattgccactttatatatgagaaacaatattccgagatatgaatttgcaaaaggtaaaagaataaataaaaatccacaaaacttctgattctaaatctagtattcttttcaaccaaaccttgctgggttgcttatgtagaattcatgtttgactcccaagacaaaactggtagaaggttaaagaaaaattctagagtttgctaaagcatatatacacttttaacctatgatgtttcatgaatttaaaacaattatagaagttcctttcctttttgtatggattctcataaaatcatatgaaatttgatttatagttttcatagaaatgtttaaatcccaaccaaagtgggcacccatgtgtaatattcttccaggatagttgttaaatatgtgattgcatattcttagcagcatggtcttactgtttggctacactaattgtaagagtttttgccttcttgtggaagtaagaagtgtctgtttgttcctggttcctatgtggataggccacactaattcccctactgcatcacaattcttcagaattgtgataggaaagatacttctggctctaccgtcctccaggcaggatatcaccatacctttagtgcttcctcagctacagctttcagattttacctctggttgctttctagtttgtgtatgtctttcttgaaccgtatcaggcataagctaaccaatgcagaagatggtgagaattctaagtgccttatctgggacactgtacttcttttcttgtaaacttctaaaattcatgagctatatttctgcttcattgctgaattacaatatgttatgaggtagtcagtttatccattgattattatttccaaatcatcaaatggttcaacctttctttgttgctttttctactatttagggaggtatctgtaactgcaccaagtcaatttattaagtgcaatgcttttagtaaaatgacaccttcaacagaggtcaggacagtaaaatttccttatttacaccttatctgtcctctgtggtattgaggtttgggcatgagaaccaaaaaagtaatttggttcctttgttatattttcgtttttactttccagggttgggggcttttatcaacctgaaaaaatctttctataaatcagtcgactttcaacataattaggagaagctgagatgacatggaaataaatatttctgcaaagggattcagtcattttatttgaaaaagacatgaaaagttcctttaaaatataattttcttttttgctaacatgaacaaattagaaaactttttttcaaacattcatatcaatcttcctgaaacactaatatttataaagccataaaatctgtttaaaggcaattaggaaacacaaattgtctaaggaattaagtcccacatctcttacctggcataggatattctccaaatcagattcattcctggcctttgccatttatcagttcaagagactttagcaagatactgaaaccctctccattttcttatctctgaggaaggatgtatctacctcatagagttgtagggactgtgcgaaaaagcaaaacctttagcaaagtgtgtggctccttgtctttaataatcagcagtcctgattctgctgtatagaaacagcaacccttgacttcagacagaccatgcagtcttgtcactatttctcaaatatactattaggattctatttccatgtatcaactttattggggtcttctgccatggcttttccccccactctgttccacatatctagagtgtgttctgctttggggttcacaaaaaatgtattccctgattattcctccctttagtgatctgtccttcttttggcattcacatgacaagtttgccaataatttcggcagtgagttaagtgtattatacagccttgcttaacttctgtcttctggatatgtatgtcttggtctctatgcaattggaaactcattctactatgtccatcatatcactgtgtaaataccaggacttcagtaatggttatttaattcaaaaagttgtccaatcaagaagtcagtgttttaaccctcacatatgttatgtgactttaggggagaaactttaccacaagattcataaatttctacagagaaatagcacatggaataaaaattattagactatctttagagaggagatgctgagtaggaacaagagaaaaataaaggcagattttgcttatttaagttgtctatactgatccctctgcaaactgacttttgggaaatccttgaggtaaaaaggaagattgaaatgtttccagtgtcttagaaaaaaaaaatgtataagatgaagaagatgatgttgaaatattcccaaggtgacatttagaagaggctgcaattctgcagacagcagaaatccctttactaatagtaaaacatatctttatttttcattgacacttctattttgcagagaaaactacaaataaaacatttctttgcatttttcttccttttttttccccaatggagtaaatatgaataaattttaggaatgtctcatatttaactaatgaaatttttgcttgatagtggttagaacattttacatgttataatttcaacattagtatgatatttggagggacaagaagaataaaaaactggtaacgaccattgatatttagaagtttaactgaggaaaattagtaacaaattaaatttccatagcatatcagtaaaaacttgggttccaactaatctgtggggctatgtattagtctgtttgcatgctgttgacaaagacatacctgacactgggaagaaaaagagatttaattggacttacagttccacatacctgggtagacctcagaatcatggcaggaggcgaaaggtactttttacatggcagcggcaagagaaaaagaggaagaagcaaaagcggaaacccctgataaacctatcagattctgtgagacttattcattgtcattaagaatagcaggggaaagactggcccccatgattcaattacctccccctgcatccttcccacaacatgtgggaattgtgggagatacaattcaagttgaaatttgggaggcggcacagctgaaccatatcagtctgtattatctctctttttttctgctttaagtgactatacgtaggtgttgttttcagggattatacataggtattctgaaagatggggttattttctgtttcattctttgactaagtggcttcttttgtccttatgtgccagaatagcctaaaaaatgagagaaaaatcactcaaatagaattaaaaagatttgggaagaaaaattatttattttacatctttatccattatatctgtttaataagtttattttatagatttaaataagttaataagagttaaattacatttcaaatttagcataaaaaataatctctcttagacatattatcagagggatcattaattttatcaagcattttgagggaatgtattattgtcttcaacagaaaaataaaaatacaatactaaataaaataaagaagtggattgtaggattttcccctaataaaatgtcccaatctctttttcattttaatacttccccttaaccataatgaagtagagttgagctccattcctggaaaaacaataagacgaacaaagttcttgtttgatcaatgtttttatgccagcctgtccttacttagcagtatctgataaggcatttccttgtgggcatttttcttttcttctcttttcccaataatcaaaattaaaaagtcaattattgaatgacttccatgtgcttggtactttgcaatggaaattttgccaaatacgccatgagtaatatttcaagaaactgtttgaacttgggtgggaagatgatatgtacatagcaagttacttctaagaaaatggaaagataaaaacagcattgtagagttaagaggagagttataacaattactactagtttttctttagaaaactaataatttactgttttatcttgagagtatattgctactgggctgatgtgggccatttcatgttatcttcagtgatacaaagtaaaaagtcttcgctttatctgtcaaggccaaaataaagtgtcaaggctaaaaggtaggtagatggcttccattttaacataattttaaaaaaatgtttaggagaatattcaaatctatgttataatctatgttttcagtatgaaaaatgacaacatattatacatcatatcatcatgtgataacatgttcaaaataaagtgattcttgtaacttttcacttaaaataatacattatgtactgggaagtaactgctatgagatattaaatacacccacaccccaggcagtagcacatgcaatatcttattcagctttatgactgttgctacctttaccttatgctttaactctgacagttgatcctccaatttgaactgtcttaacataaacaatttttttctttgaagcacaatcacttgaaatataaataaatcaatatattactgaggagttttaaagaacataggccaaggtttgatttctatgtgatctttaaatttaaaacattatctgctttctaagatgtcttttaattccctgtgcttcatgtttagttggtttcaaattgtcaataaaaatagggacatactttttaaagaaaaatacttgttaaaggaaagagttcttgaaatcatgtaattttttttttgttttgttttagagtgaattcttctttaattgacttgtaaagagtgaagtatttggaattcattttatttgatgtaggtagtagaaaatagcttgaagaagatatgccagatgtgcgatttagctgtcttcatcagtcttgagaaaatagagtgagcaaaggataaatccaacagttgttgaactacttttgcgtgtgggattctagttaacgagacaatgtctggatgcaattatttggaaagttcttgaccttttatttgtacaagttgatataattatgatttcatgaggaatggttttgaaattcttaaaccaattttagtcctgtgtttatattgtgtcttttactttagaaatcctggaaatgttttctacttttaacttttacagtgtgtctttaaaagctcacgttattagcttcaaagtgttttagtttaaattcccatttcaaagaattattcttgcttagttacaaagaaaatttgtaacagcattctatgattcttaattcaaatgccttcatatttttctatttgtacttgatgataaaaaatagagaaaataaatacatgtgtaccacttcttactggccagctaaccaaacttagcagtcaagtaacagctgcaaaaaccacttcaggttcctagctctatttctagagctgtcttgtccaggacagtggctgctacccacctgtggctcttgagcacctgaaaggtagatagtgcaaactgacagtctttaagtgtaaagtacttgacaactttaaataagataataggaaaaaagaatgtaaaatttctcaataattttcatgtgggttacttattgaaacataataacttgaatacattaagtaaaatatattgttaaattactttcatctctttaatttcaattttttaaagatgcttacaattttatatggggttttcattatatttctattgaacagtgctattctacacacaagctcatcttccttaaatattgttggtgcctcgaaccatgattccatcacttcttttcattggccaatttctttttttcttttttttgaattgagacatagtttcactcttgtcacccaggctggaatgcaatggcgcgatctcggctcaccacaacctccacctcctaggtccaagagattctcctgcctcagcttcccacgtagctaggattacaggcattcaccactacggcagctaatttttgtatttttagcagagatggggtttcaccatgttggccaggctggtcttgaactcctgacctcaggtgatccgcccgcctcggccttccaaagtgctgggattacaggagtaagccaccgtgcctggctgccaatttctcataatagttgttgattcgcgtttcttcctgtgtccaatgtagactacaacttcttgtacattgtcttccataaaaatttattaactttctcaattccccattaaagtaacctgcaacttcttcattgccagatcatctcagtccttattctcttttcctttctgtttttttttcttgagcatttgatagttttctgtcttttttttttttttttttttttttttttttgagacagagtctcgctctgttgcccagactggagtgcaatggcacaattttggctcattgcaacctctgcctccccggttcaagcaactctcctgcctcagcctcctgagtagctgggattacaggcaggtgccaccatgcctggccaatttgttattttcagtagagatggggtttcaccataatattggtcaggctggtcttgaactcctgacctcatgatcctcccacctcggcctcccaaggtgctgggattataggcttgagccacctcacgcagacagttttctgtcttttaaattttcattttgcttgtttccatcctgatctctttttccctgaattttatttctcaattaatattgtaaatgtatctttttcaccatggaattgtttatcgagtattggaaaaagtatgggacaaaattcccctctctcctcactcaccctgccccaagtacaccttgttttacctatatttctcaagactgagatttgctactctctattggtggaggggaactcctatttaagaatcacttccatggggagctactcttactgatgaaaatttatcaaaccctgcaagtatgcaagaatacttgaggttctctttcttaaaatatcaaataactcgtgctttgaatgattacttccgtgcagatgacttccaaatatatgtccgtttttctcctcggaactactagtatttgtcccattactgaagaacttcacatataaattccaccaccaccaaaatatattaaaaactgagcttatcttcactttcagcgttactcatcttgtttccagcaggatctcttttgtttcagctaaccaggctttcatatttttagtcatttttaatagagactttgctccctgaatccttgcattttataagctattaaacattgttgattataacttcattttctctcaacttcaccattcctattgcctctagtttataatattgctgatgtagtttgggacatgatagactttaggacaaatgaatcttctaaatgatttccttgcccacagactttccatttatgtttgaagccaaactatacatcaacaacagcaaaaagaaccctctcctccaaaaaccttcagtagttactgattgattataaaataagtcaatctaactttttaaaatttaaggcttagtatggtttccaaactatttccagattgattgcattcttctccattttaaagatgccttcatcaactaaactactgctgtttttcataaatattgtatgttctgtggctttagtgctttggctgttgtttgtccctatgtggggagggtactttttctgccaaatccctccttcccttaccccaagtctcgaattccaagttccatttgtgttccagagttccctcaaaggctacctgctccaaaactatcttcatggttttgcacaacgcctagttctctcttctgaactcccatagctttttcccttcaactttttttttcttttttttgagacggagtcttgttctgtcgcccaggttggagtgcaaaggcgtgatcttagctcactgcagcctctgcctctcgggttcaagcgattcttctgcctcagcctcccaagtagctggctaatttttgtatttttagtagagacggggtttcaccatgttggccaggctgggcttgaactcctgacctctagtcatccgcccacctcagcctgccaaagagctgggattataggcgtgagccaccacatctataatcttcaactttaaagtgtcatttatcagattgtatatggtgttatggttttccataaagatgttttatattctatttactctctaagaagacaggatctgtgtctgattcctttgtttactacagagctgagcacatggtatttaatacattatagattatgaaagttccataactatttatcaaatagatgcatgtactcatatacatcagatcgattaagaaaacacactattactgctctaatcctattgctgtgattgtctattgtttttatacttctgggttaactattgaataaaagggtaagcattcatattgatttgactccctctttcttacgggaaaaaaaatagcagtgcactttgaatatattagagtgctttcactttttcatttctgccatccaaccctttcaagtatatcgggccccattccatttgtctttcagcaatcacacacttttatatttatatatatattttaaaatctgtattcctttttaagatatttaccttttttccttaagctgttactatgctttatcaggtgtctttttggttttctcaataaaattgcccatatgttcaaggcctttgtcattatgctttagtactttagtgaaggtatgctgcagtatacgtaaaaagtccttaataaatttttgaatgaatctgatatgtgatggcacatcatggtaatctattctaaggtgaatcacaaacagcctagactatatgtgtcctcttaactttgagatttgttttcaataattattactctttggtcactttgaacaaaagctattttcatagactctggtccttcaaaactctttcctattgcttggggttgatgtctagaaaatccatgcatacctctaccactctgctggcattttccatactctctgtacacagctcagtatattttggtagctagtatcatggagatagatttttaatgcattttatatgaccttttaagaaaaagtgaggtgtgaaatagccagcaatcatttgcagctgccaaaaatgccatgcagggtgcctttgattttaccgactgccacaatctggttcaaatccttgtcattatctaagacaaatttctactctgttgtgttataaaaatagattaattataataaaacaggtaaaattttgaaatggattaccttatgggaagtaaaaataattggactctttcccttaatttctaaattacttctagaataagagaaatgtttggtgaagaatcttaacccatctaagcaatgcgtttgtcaagtaggaagggatatatataatcccatatatatacacgtatatcccatatacacatatgccatatacacgtatatcccatatacgtatatcccatatacacgtatatcccatatacacgtatatcccatatacacgtatatcccatatacgtgtatatcccatatacacgtatatcccgtatacgtgtatatcccatatacacgtatatcccgtatacgtgtatatcccatatacacgtatatccgtatacgtgtatatcccatatacgtgtatatcccgtatacgtgtatatcccatatacacgtatatcccgtatacgtgtatatcccatatacacgtatatcccgtatacgtgtatatcccatatacacgtatatcccgtatacgtgtatatcccatatacatacgtgtatcccatatacacgtatatcccatatacgtgtatcccatatacatatgtatatcccatatacgtgtatcccatatacatacgtatatcccatatacgagtatcccatatacatgtataaaccatatacgagtatcccatatatatgtataacccatatacgtgtatcccatatatgtataacccatatacgtatatcccatatatatgtatcacccatatacgtatatcccatatatatatcctgtgtgtgtatatataaatatcctgtgtctgtatatatatatatatcctgtgtgtgtatatatatatatatcctgtgtgtgtgtgtttatatatatgtatatatacatatatgggatatacatatatgtatatgggatatacgtatatgtatatggggtatacgtatatgggatatacatatatatggggtatacgtatatgggatatacatatatatggggtatacgtatatgggatatacatatatatggggtatacgtatatgggatatacatatatatggggtatacgtatatgggatatacatatatatggggtatacgtatatgggatatacatatatatggggtatacgtatatgggatatacatatatatggggtatacgtatatgggatatacatatatatggggtatacgtatatgggatatacatatatatggggtatacgtatatgggatatacatatatatggggtatacgtatatgggatatacatatatatggggtatacgtatatgggatatacatatatatggggtatacgtatatgggatatacatatatatggggtatacgtatatgggctatacatatatatggggtatacgtatatgggatacacatatatatggggtatacgtatatgggatatacatatatatggggtatacgtatatgggatatacatatatatggggtatacgtatatgggatatacatatatatggggtatacgtatatgggatatacatatatatggggtatacgtatatgggatatacatatatatggggtatacgtatatgggatatacatatatatgggtatacgtatatgggatatacatatatatggggtatacgtatatgggatatacatatatatggggtatatatgtatcccatatacatatatatatacacacacacatatatattcaagtgtgtttttattttgattttattttattttttgagatggagtgttgctctgccactcaggctggagtgcagtggtgcaatctcagctcagtgcaacctccgatccccaggttcaagtgcttctcctgcatcagcctcctgagtagctcggactacaggtacgggccaccatgcctggctaattgttgtatttttagtagagaagggtttcaccatgttggccactgactgtgctttggtttggcttataggaaataatttttatgaaccaaaattacatataacattcattttaagagaataatatgaattatttatgatgacaagtgaaccattatgtaaaatgctactgtcattaataaaatggcaccttatgatgtgaaattgcaaaatgactagcttacttttaggaagtcaccaacacactgggataatctgattgacaattacatcatatttttatatttaaggagtccttgctcctgtgtgctgtctaaaccactggtggatgaatacttttaacaattcttaatatatattagtgcagtgctgaagttatcaaagtgggtccgaagaataaatatatcaaatagcagtaataggccaggtgtgttggtcacacctgtaatcccggcagtttgggaggctgagataggcagattgcttgaacccaggacttcaagaccagcttgggcaatagagtgagaccttatctctacaaaacacaaacaaacaaacaagcaaacaaaaaacttggccaggcatagtggcgcacacctgtagtcccagctactcaagaggcagaggtgggaggatagcctgagcctgggagacagaggttgcagtgagtcgagattgtgccactgtactataatcttggtgtcagaatgagactccgtctcaaaaaacaataaccaaaaaacccccaaatagtagtaataatttaaaattagaataaaacgtgagcacttatgatgtattgtttttcaccatttatgaataccatttttttttaaggaccttgctatatggttagggtttggttgtttggaggtgaaattggggaaaggcattccagacagagaaaatgatatgagtaagtataggcagataggaaagatcatggggaaccaagagaaggaattgatggtagaagatgttagagtgagtttggaatcagaccataaagacattccagtgtcatgctaagaggtttggaaataacctataggggagtgattgacaaactgtttctagagacggttagatagtaaatatctgtaggctttgccagccttgtggtctctgttgcaactattcaactttgccattatagtgtgaaatcagccacaaaataaacaaaaggttgtggcagcattccaataaaactgtatttacaaataaaggtaggcaagatttggcctacagactattatttgctgacctctgctctagagaagagggacccaattggtgactttttttttttttttttttagaaatagtctcactcttgtcaccgaggctggagtgcagtggcgtggtctcagctcactgcaacctccacctcccgggttcaagtgattctcctgtctcagcctcccaagtagctgggattacaggtaccgaccaccacacccagctaatttttgtatttttagtacagatggggtttcaccatgttggccaggctggtctcgaactcctgagctcaggagattcatccgcctcggcctcccaaagtgctgggattacaggtgtgagccactgcgcctggcccagttggtgatttttaggcaaaaaggagaggtaattaaactaactgctgaactaggacagtagaagaggtaatgaaggaagagatagattggacagagcttttgaagtagacattatagatttcatgaaaaattcaaggaaaaaaataagtcgtctttcatattctggagcctagatggagctatagataatggtggaatcaagatcccccaaatattggcaggctggaatgatagatcaaatatagttaacataagttttataaaggtcaatgtatgatcttcgttgaaaggattcaaaatggtgtacttagcagtttacattcagaaattatttgaagattttagttgactactctcaagctcaattatgagtttgaagagacagcataatgaagcaaaagagtattgaaatgatctcagaagaacccttggaactataaaactagttattccattggatccttaaaataactgctgaagaatgtaaggcatgaacttttctctatagagacagaatatttgggaattcagatctaagtttctttcacaattggatccagttggattgagcatccattctcaaaacttcacaatattttaacctcaagcaattctgacagcggagtctagtctacgatttgagtgttaatattacaaccatgggaattaggtaaaaagaatattccataacaccatttctaaagaacatcaagaaacaggccaggcgcggtggctcacgcctgtaatcccagcactttgggaggccgaggcgggtcgagcacgaggtcaggagatcgagaccatcctggctaacacggtgaaaccccatctctattaaaaatacaaaacgttagccgggtgtgatggcgggcgcctgtagtcccaggaggctgaggcaggagaatggcatgaacccgggaggtggagcttgcagtgagccgagatggtgccactgcactccagcctgggcgacagagcgagactctgtctccaaaaaaaaaaaaaaaaaagaagatcaagaaaccaaggaaaagagaagttaagtggcttgcttaaaatcaccttgcattctagtaatctagtaatagactcaacattagaatcttgtgctgttgtatttttaacccaggcttatctgtttaataacacgactggctcttgaagaatattacagagagagctttcctcatggagttcaactactttagacacttcagattattgcaaaagtgttcattctcaccatctttatgtaaggtagataaactacaattaagtaggtaatagttaattgctataactgtattccgtttgaaaaaaatataaattaaaatatataattttaggttcctgatatgctttgaatgccttaagagtctcaaaaggacacaactacattctgaaattaagaaaatgtagcccttagaattgcttaaaatcatcacatttcaaaaaaaaaatactgatttgtataattgtagctattttacatgacaattataactaataaaaataatgataagacaataacaaatcttaatggctgaatgtaaaataaaatttgctttctgctaagtaagctctcaggtgcacaacaaagtacataatgctttaggtgtttgtgtgtctgtaaatgccaaataatgaagagtgtgtgtttgtatatatctgtacacacatatacatatatgtgtgtatgtgtgtgcaaacactcatatgtacatgctcacacaatatataaaggaagaaattaaaattagacaacattatgcaataaaagtaaacattttgtgattgattttttgactttgcgtgcatgactcatgcttatttcaaatacattcagaatgagtagacttgtccttcatgtgattgaaaacatacattttacacaactttttattgcttctctgtacttagcttttaatctaggaaaaagaaatgtgtaaatagtttaaatacttgattcctcttggagaataagttggtacagaatagaataggctggtagccccaggtaatgacttctgcctttcttagaacttgttttcacctttgttgctttatttttctttatttttctctttttttaaaattattattatactttaagttttagggtacatgtgcacaatgtgcaggttagttacatatgtatacatgtgccatgctggtgtgctgcacccactaactcgtcatctagcatgtttctttatttttctagttataagattagaaaaactgatcaactttcattgtaccatgaaaaaatgtctttaatcttatgtttctttatagacatgatacatatatacagaataacttgttaagatgatttttgagtggagccgcaataaatgttcattccatattattgcatttaggatacattggtaaatcagaggattttaaaataaaggtggattggtagtgaatatttctgttacccaggtgcccatcaggcttggcttattctgctttatggccttgtaaacaattttgagaagttttattatttttagtgtacgttgagtaattctaattacctaatattcttcctctggagagactgaaaacttcgacaatacactaacaattgaattcacatatgcatattttattttaaactgattctaaacaagtttcattctgtgggtctgtcattgtgtttgtcattgttatgcatagattccacaggacctgactaacatttaacagtattaagggatgtaacatacatagcagtatgctagcaagagagtgattttgtgatagcttcattttatggatatcaatcctgattactagtgatagactaccataacccaagattcttttcaaggtcattgccatgttgatgctttccttaatatatttacttttcctaaagaggagtggtgtccttttatgtattcatttgtgtgtgactttttaaataagtatctcttaaaatctatcagaatgttctctcatatgtgtggactagatagattgcattcagaaatgccattttagatctgattattaatctaaaggggctatgaaaaataaaaagaaagcaaattcattttgggaataatttattcaaaataaatgtgcactctgggacatgaaacaagttcacttaatctgtacaaacatttaatgcaaaatcttcaatttaaatgaagtgccccaggtgaagctctcctctctattgtccatcactcttagatgtttttgtgttcttttacttgggatttcttcattaatctggggtaaattcttttgtaggatgaactaaataaaaaaaagtaaagttttccatatgctttccattcactgtctattacactgagtaaggaagctgattatcatatttaatttacatagttaaaaaaacctcaaaaaccaaacaaaacccaaacaggtggtttgtattgaagaaataaaataagcattattattatagaataggtcaattctttttctattacacattacttggatagaataaagtagacagctcatgctgagaaaactgaaatgtagagaatgcaagagttaaaagacagacaatacactcagtagtgtctcaggcatggatctctgaaaattatgaagaaccatcccacttgaatgaataaaaagcatgagcttatctgttgtttgctttcagttttgaaagtcattttataaattggggatgctaatgatttcatccttctgattaaatttatagagtcatttatttctcctatgttaaatgtatttgtgaggaattcatggaaattatttttattgctgaatacaatttttttctctttagaggcacagtttttgtaaagtgaaaatatttatgattatgctagtatagtccttagagtcatttactcatttctttagactcttcgggagcaaaatcaaccaaaaggtgtctttggtaatttaacacttaacctgagatgttaaggttttaatttgggaaattctaattttgggttctaaatgggtgtttccaaagagatatgatcatagttttggcaagtatcatacagtaaaataaaatccctcatgttaccaaatgaattttctaaatatttaaattgaataaaatgctttctttttatactgaagtatatgcacttcatagaaaactaatgattttgaaaggtagtttttcccgtttttctatttaattgacatttaattgacagcatgttttcaggagcagagatttttgagagtgctgatacattcatatattttaattgtagaaatcctggacatgaggagtgttttgcattaagtttcgcacctgatcacattcctgttggaaggtttccagagtgtggtctagaaaggactgttacttccaacttgtgccactgaaattaagatctactccccagagaagacaagtgaattaacacagtatgctttatgcacagtgaaaacaaactaatttgggttacttactactttgcttagaactgcaaaaagtgcagtagcatatacttgcagctgattgagtgaactccattttttatattaaatatagaatcagtgatttactacagggctttgtttcaggttcttctgaaatgctaacagtctctgaaactaggcttttgtgccaactacattccacagcaacattctcttccttttccatgtcctcattttcagctctttattggctgattgttgatagcaaataataaacattaaaaatcaacagacctataacctacatctttgtacatatcaaacacatttgaatagggaaatatcatcaatgccatattattagcaaataaagaataatcactcagacatgaagaagtattcaaagactggaagattttggtgatgaagacaggcgaaataatagaaatgtgcaccagggctgttggtgtatcttgtagggaagatctagaaaattagattaatcaaggagcagacatttggaagaaagtttgtgtgaatgcctgacagtcttgctctttccctcatttcaaatgttggcagggtagcaggcagctccaagggaaatgtgctcctttcatacttgagtaattgatgaattgtatgcaatatgcaaatgagaatccataaatcttatgaatgacagcttaatttatgtgagccttaatgaatgcaggattagattttaattaaatatcctcaaaggcaccctgagtagtagatttttttaggccttgttttttgaagacttgtttctcaagcaatgcattttacaaaagcggaaaatcaggcaaagaattcagcctatattttaataataagcattgtttcattttacatagaaaacagcagatcaattgattggtctttaacaaaatatgtatagatctatttattttctaaacatttctctaaattcgattacttttattgttggtctctgatatcatatgctatttttaattctgagaaagttattaaaactttactaaaaaatataccagagctaaagaattgtttaataagagatatattagatagataaacatttaaagtatcaaatataattagaataaaataaagtcttcctaaccattgttttctttttcaaaattgcctctctagacaatacttaatgagataagatgataaataagactattttatacatgatatttaataaggagacttgtatactaaaattaaactgaaatgatgtatactcctgtggaatagttacctctttaattcactttagtaccttgaatttaaatatagatttttcattgcctatttattggatgacaaaaaaatcactttatttttctattaggcgtatacttttttacttagaatttgtttaatttaggatgaaaatgcacatgtgatttggatgtttagatatccaaacaattatttcttacatttaaagcgttttcttgttaagtcacgctgagtttactgtttttaatactcatcagttgtttcaactaaatcagttttaaatctcagacatggaagtattcttttgctttttctctcagtaatgatactagtgcctatgtgcatataaataggaaaattcacattttcccctattaatgaaacaaacttatagggcttcaacatgcggtctattcgcctcaactccctgtagcattacaagtgtataattcattgagaagaatagaggtttaaaacatgccaggcagagtcttggtccatagctgagattctgagggggaagcatctgtgaggacctcaactgaaattgcatgcacaattttaggtaaatcactatgtgttcattaatgattaaaggggtccgtaactttcaacaggttctccaaggggatttgttatccagaaagacaaactataatgcaaaagacaatagcaaatacataactttgtggagcaaagtgtatctatttgaaaccaaaaaagccccatgtaatccagtgcctttataaaccatgcagctttctaagagatcaatcatgtgtaagcatgctttccttaaatcttccactcatattttttaatactgtattatttattttcagagcaatatccaaacaaaatatcctgcatttttgttttattttcaatgatgattgccatcccaaatattgtgaattaaggagcttatttctctaatagatattatcaattatatttttaatgtgtttatgtaaagaacatctactaatcaaagtaaaatttatacatgctacataaaatggcaatataattctagacaaaacaaattttaagatatttagcaaaaaatcaagatttagctagctttaaagtttatattttatatagtttcatcaactttactcttattggtaccactccttccctagggcattttactttaatattaaatgttagataccacaatgcactcagagaaagagaggactaacacttgaatgaaatgacagcttttgagaggagttttagaagtagaattcgatattttggttaatttctatttactttctctctcttttgtcttcttttttgaaactcagctgaatccgtaggttcattttcttagaggctacattgctcaaaacaattaaagctttgtcaagaaaggtgccttttgagaaacatggttttttgacgctaacattcatattgctttgatgagacttgttttgctaaaaatttttcaagtcttttttgttgtactaattttatgttcaaaaccattattttcaagttttcttttgaattttttttttacagtttcagtttcactaagatatgctataatccacatgtaaagtccgttttttgccaattgtaatatcacattttgatgttttgcacttgcaaatggagtgttagagagaattgcttgttcctttgcaaacccaaaagttatagttagttgtgattgacattcattataacataaaggttcatccatgaagaaacatttctaagacgagtgtttgagactgccaaatatttgaatgtttttattcctctaaagtagtctttatggagctaattggagcttaaaaaaatacaaatggacataaatcataaagaaacttacttgcaagttcctttacaattcttctctgtttaaaactctaggcataacatagtttctttcttttgatatcataactaacatacattttctatgtattttttgatataagtaatactttattcaattgacttggaaataacccatctactttgctgtgtataaaaaaattcagaaatggaagtatatggtatagttgtatcatatcaagagtgtttccaagttattttgaacaagttatagagcaggttttaggcaaatgttgatgatctcaggatttctgttggtcagttggagtaatttaagatttaaattggcatgcattgaatatattgtttttagttattataaatttaattttatttattcattcagtaaattatatttgctaaagggcagaaagttttgcctagttgggagtcaccaaatggaattatccaagtatagcaagctgtcttcagtacagttttgatgaaggttttcaaatgtaaaattacttctcacttgagctaaacaggataaatacaactataaaccccttagaagtttttgatgatagaagttttttcatatttgtttcctttattttgaaaacaaacaagttggaactagtttccattagatacgaatttatttttctacttaccttaggtttaagtgaatgcctacaaaatttcaatactgagagggcttttcagactaatctaagaattgctgattcctatcaaaatagtctgaaaggaaagtgaaaacaaaaatacaaaacaggccaggtgcagtggttcaggcctgtaagcccagcaatttgggaggccgaggtgggcagatcacttgaggccaggagtttgagaccaacctgagcaacatggtggaaccccgattctactaaaaagacaaaaattagcttggtatggtggcacttgcctgtaatccaagctactcaagaggctgaggtgggcggatcactagagcccagaaggcagaagttgcagtaagccaagacagcaccactgcacttcagactggaaaaggcagtgagactctgtctcaaaaaacaaaacaaaacaaaacaaaaaagcaaaacaataatttatcatttaatttgttaagaaacagaagaggattgatgtgggattagaacataaatttttaaaaaaccaccttactaaaaacagattttattgcgtcaaatgcaagtcaacatcaaaagaggtttttaatattactgttcaggtacctatttatttgtgcggtctgaagttataaaatatcttaaaacataatgccaaatatttggggaaccatgttaaccatgttaactaggacacattttattttattttttagataggatctcactctactgcctcggctggaatgcaatggtgtgatcagggttcactgcagcctcaaccttctggggtcaagtgatcctcctaccttaggctcctgagtagctggggctacaggcatgtgccaccacgctggactaattttttttttttttttttaatttgtgtagagacaaatttggcctggttttcccaggctggttctcaaactcctgggctcaagcgatccttttgcctcaacctcccaaagtgctaggattacaggtacaagctgctatgccagacctagacacattttaataggttttattttatttaggatagagaaatgtacaacggtttctggttttgacacaacaatccatgaaaaagatgaaaagaaacctggaactcagcacattctgctcttttgaatatagatggtactgagtcattcctttacaaagtctccaaataacagagatattctaaccctagcccctgctcctaagcattgagggaggaggtgataagaatcctcctcctctctttagctacacccccagctccatcgtagtttatgagaaagccacgaatagtatattgaagccccacagcaatgatgtagacattgaacccagaaagttgaagttcatacaagtaaaaactgaaacctgtaccttctgaccccaaatccaaagctctttcctcaacttttgaaactgaatgatactgtgtgtctggcttttcagtactttatcaacatatttagaactattgtttctagcaagataaaataataaatgagaaaatgatatatatctgtttggggattattttaaatgcatacagatttttacattgatataagccaagctcactatgatgatagttttcaagtattattatccggaagtacccccttcccaattttcaagttctgtccagaaagctattaagtaaccaaccactgctttctttggtgttcggtatgacttagtcatgagtagctgcaactgggagtttcacataggaaggacttgttatattccacctcgtagtcattagaagggaatgttgttctgtgaattattttttctaaaagaaggaaagaagcaagttgatattttctctcaaaaggtagaaaatctcataggaaatcaacaaatgtcaatatggagggagttagtaagaaaacaaaacttactaaacttcttaaaatcacccagaatgtctgtaaggaaagccaaaaggaagatggtttcctcactttcatcctgattgtattacctgtttataatacagaaactcatttatagcaaatggcatatgctggttgtatactgctaaggaatattactttctaatatataaattattcaaagtgatgattcatatactggagtaaaaataatttaatggtatagacttataattgcctaagagcataatttctaattctatccttataataaatatcattctaatagatacactattcaaaaggattattaaagcttcaggtatatattcataactttaagtgtctataatgtaccactcaagaagtaaaatgctttaacatattgttaagaactttcatctaaaatcttattttttaaatggatatcatatttctttttttccaacatacttttaaggaagaaaaaatgatatgaggatttcttaattattttatgatatcgcacaaaataaataaaaacctaagttaaaacataattcattgcacagcaaattactgaaacaaaagagaagaaaatgaggactagtccttttttattattcatatgacttggtgattattttagttcttttgaaatagtggctgcaaatgaaacgtagactgttaattgtgacattgctatcagaagcctctaaaaccaagctgcttttaatgaatgcaaagtcagataattacagaatttggactacccctagttaccaaatgagtaaaagtggcatttaagtgtttggccctttagttcagagctcttagtagatgaaaatatgttcatctcttacctcccctagtgataattataattgtattgttggatcacatctcttgactcttgtgtaatttagctctgtcagcattaatctcttggctgttcacatcagtggaactaaatgtctgcttaatattatgtaggttaggtggttgtcatcctagttgggagaaaacaatgaaaaaatttactgtggtgttaggcaaatgtattatgagggcatcaggctcaatatctgaacatcgacactatgtatagggaaatcatgtttggatatagatttttactttcttcaaataaaggattagtgttggctttgtttcttaaatatccataggtaatgtttccctattttttccaaccaatattattattgttgtttgttctacagtatttttaacaggaaatagctgtggatcatcaagtaagagagaaatgcattttataatgcagatttacattttcctttcagtatgtgatgacagggacatttatctgggtgtaggaacaatctgacaagtgtgagagataactgcttgatataaagtaactactgcaagaaaataaactttttgataaagacatcttagaactgataagtaaagtttagagaacataactgtctgctatcatgtatcatgtttttacctttatattgatctggatcttttatatggatagcaaagcattgacaaagaaggactaaagtagacatttatataatgcactttcagctgcagcattatctttacatgttagcaggcaaaggattcatatttcattaaaataccgatagtattctttatagaatctgaaaatttaaacaccatggagtgctttggaattttaaatgaatggttttcatttatattacattttaatttagttagtcaaacacatttgttagacatgattatgagctgagccttgaactagacgttatggctgacaatagggtaacaaggtgtgtctcttgacacacctatatatatttctgagagagaaaatatatttggggaatgcaaaaatgtgctgtgaacagcaaaagatttaaaacttagtaagagagcatacaaataaatactattcatatgtcagtgaagtccaaatgtctgccagcctcctggagtccattctttcttttctccccttcacatgctggaataagccatgctagctttcctttgctttcctgatcagacttaggccttttgcactcactagtccatttgctgagacattttctgctgattttcccatagcttcacccatccatagctgctaacttcttgatattcaagtctcatcttcttagagaagtcttctgtgtacaagtaatttaaagacagcattttagtagtttattcatctatttatgtgttgtctttcttcacctagattcttccccagtacgtaataaactctcaataaatattgaaccaaaaagataaataaagaactaaaagtagaaacagttaatatatttcaataaggcttcctggggaggtcactttttatttttatttatttatttgacagagtgtcactctgtggcccaggctggagtgcagtggcgtgatcacagctcagtgcagcctcaacctcctgtgctcaagtaatctttccacctcagcctccagagtagctgggactacaggttcatgccaccaagccaggctaatttttaaattttttgtagtgatggggtttcagtatgttaccgaggctgagattgaactccttggctcagacaatcctcccaaggccacttttaaaatctgtttttgatggaaagaaaagtgatactcttcttctttacccaaaagaaaaatataggtaatagaataatacacacagatagtgagcatagtatagaaagtgtactgtgacttctagaaaaaaatctatgtctattctttgcattgcatgaaattgtaatgtgaactgaaatgtagtcaaattggtgagaatgtggggtgttaagtttgtaaagaggctgaaagaccaaaagaagaggcttggtacatgctacagtaagacatgggatctatgttgttccttgagcagaaaatcctatgattaaataagccattctattttgggtcaaagacaacctttcaaaggtggcctacaaaggctcatttacttttgtacttaagaaatagcaccagaggttgcattcatacagaagaaggagcctcttttaaatgcaaatactcataatttaagcttttaactttaattatcaattaaatcctcgcagggtttagttgactgttgaaagcaaaatactaagatgtgtagatgtctggggtgatgggtttaaatgtcaatgggaggagtaagaatgccaacagaaaagaaagctccactaacagtagagacatgaagattgccagattataattttcctaaagcttgctttggctattacttaaaaatcttcttacctaataatttttattctaaaagcaatgggtaggatggtttataaatgggaatgttgatagagcagccagttatcaggataacataagatcctaaggaaatatgcacctaattaatgaaatagcaaacaaatggaaaagaaacaatatgtttgaatacataatcaactctacttggtgatggagattacagagaagggaatacagttttagaagagaaagaggcctcagcagtgggtgagctaaagcctgtaacaaatgccagtgtcaattttacaacatcctgatatactgagtaagttatctagctctacctgaacattgaagggagaaggatctgggagaaagagatttctatttttttttttttttttcagatatggtcttgctctgtcatccgggatggtgtgcagtgatgcgatcatagctcactgcattttggatttccctgacacaagtaatcctcctcctgagtagctgggagtataggtgcaccaccatgcccagctaattttgttttaatttttagtggaaatgaggtctcgctatgttgcccagactggtcttgaactcctgagctcgagagatccttctgcctgggcctcccaaagttctgggattgcacgtgtgagccagtgtgcccagccggaagagagcttttttttaagtctaactgttatgctctttcttccgtttggcaaaaataatctattactgagttcataagtgaaaggaatgaatttaatctgtcttttatttggttagcttttattcaatattttaaggttcccattttgttctcatcttttccatgtgagaccatatgctctctttccttcttcatttgttctggactttcgaatccttcaaccctgtggttgttcttttctggggccttctaggtgatccatgatctttttaaacactgggacacgtgattctacagagtctttgggtagcaaaagaccaaatgagagtgacatgctctcattggttctggttactctaattaacacttattaatattactgtacttgatttctgtgttttttttttaatttaaaagtttttttggactactaattccatattggttttgactgaaaaaacgaaagagatgttagatctaaagatctgactgatgagcttatgatgaatatggcaagtctcaaatgtggctggtatattcaatggcatacatcaagatacaggctatcattatattcctaagtagcaggaatctgaagaaaactagatttttttttccatcgactttatattttcctctccctgagagttacgaaatggacaatttaaattatgaatggaaacgcaatttaacgaaaaaacataaaaatgtgtaaataagaaacaaatctaagcgggcatagaggcatagaattaatgtgtgtgtgtgtgtgtgtgtgtgtgtgtgtgtgtgtgtgattacacacacaggtccttgcagtgttttcatttctggtcaccaccttagcaaactaatcaatgaggcatgaactgctatctgcagtgaaagaaatgtaaaataaaccagagataatccctcagttaaaaggttattctgtgtgataaaagctattttgttaatttatttacttactggtacagtgagataaagtgaaagtacaattaggcatttcttgttgaaagaattttaaagggcaatgatgacttaatattctgtattatttgactgacatttaaaataatttttaaactaaaattttttgtagcacacaaaattgtgtattattttgctttagtttattttatattttgaattttgtaggtgtgtacataatataattgattattcagtaaaaatgaatataaaatcttctttggatgaatccttagcattaggtctcttaatttaatgagggatggaaattttttggaaaggctattcctgtaaagtaatattttctgttaattacatgcatgatgtatactttaaaaaaatagttaattacctaatgcatgcaaggcttaaaacctggatgacaggttgatggttgcagcaaaccaccatggcacatgtatacctatgtaacaaacctgcacatatatcccagaacttaaagtaaaataaaaataaattaaattcaaaaaataattcatttgtttcttcttcagctgattcatccagcaaacagtaatacttttatccttattaccagaccattgaattctggcaaaagaggaatatatagaacatagttgctgcatttaaaggttttgttggcagactaaaataatacataaattattatgttaatagaaagactaatatgatactatggtattccatgatacaatagaagtaaaaggcaattggtgagcacttgggaagattagggaagaagttggtgagaattggtgtagggcttctcacatgtacaactgaaggaatgggcatttcaggaagaaggattagatctgtaaagcatgaatatgtgaaagtaattaggttccaactacagagtgagggtaggaaagttatgagaaattatacctgaaaggaattgaggtgctagattttgaagagtcttgtatgctatgataagaaatttggtgaatatttagattcgcagaaggcactgaatgtgctataatgttatttctatatagaacacttaggtcagtatcaaacactacaggaacacaggaggacctgagagaaggcaggagcaatgtgaatgaagaagagagtgagttggaagatgtatcataggcagaatcaatagaagatgatgattattaagctaagaagtagaaagtacattgaaaaagagggaaggattgggaagactctctgggctctggttttggggattggatggatggtggtttattttctgagatatgtaatgcaataggtaatgaggtgcaggtttaaggtagaagataagaagtttacatcagacatgttgaatttgaggcacttgtgaaatgttcagatatcacttacacctctagaaagatagatttcaaactcaagagaaaaaggaaaacattatttctgtattcccagatgtttgttttaataattgataagctaaacttcaatttaatttctaagctgatatgaaattatttgaggggtatagatttttcagtctccagagtttttgttatttttttttaggagaaacaactgaagaaaattatttttcagagcccattaattgttccccgagactgaaagttgtctttttatttacataaaagacatatctcgttctcattggaaatactctgcattaatatactctatgttcaccaatagacagctattgaaattagctatttcaatagatatcaacagctgttaaaatttctgtataatacttttactcagagaaatcaggcagggcaggaggaagaatagtgacattgagttagaaatgagattaagataatggcacaaatataggaaaccgccttcttaggttggaagaatgtaccctgaacagagcagcatacacacagccatctttttcctttgtgctcactgttcacattcttattaaatgctctatgctaatattagcttctttgactattttatttcaggtttttaagttttattggctatagcacttcttgagggtgttagggaagggaagatgtggataccaaaaggttaagtgacttgtcaaggtcacacatctaataagtgacagcttctgtcttttgatccatggcaaagtgaccttttgtctctactattcagaggcaccatggtataatggaataagtacaggctttgaagtcggagatacatggatctgacataaagatctaaaatttatgagtcatgctgttgggccagtcagctcaaatttcctcatctgagagatggagataataatatctgcctaaaacggttgttggaatttaaatgagatagatattttacttacctgttagtagatgttctgtgtatgttagctatcccttttttctcagttaagtcacaaccttaactccttgttctcaaacttggaaaaaagagaatcagtgaagccactatcaagagttgaaagggtagaccaatactttctctgcctattttatttcttggcttcatgatcttctttccatcctttctattttaaaatacatttttaaaaaatctctcttattggtgccctaaatattctaaacattgataggtttctttaaagtcaaattagtgtttaacctgcactttcagtaatattttttatattactacttggaaagtcagctcaagaacgggataaaaatattaatcctatattttcataaggaatctttactaaatataataaaattccacagatgtcttttattttttgtttcgtcctcccatttctcaaatgtgtataatactggatgtaagcatacaccaatgtaaacctacacctacaaaaatgaatttcaactaataactaacttactcaagttaaagtatgaacaagttgttgctataaacatgatacttttcgaaaaggattcttactattttgtaattctggaaaaatattattttaaggacaactattgatacaatggcccatgtcctgttttgttttgttttgttttgttttgtttaattgtccccgtttcttcgttctgttaatatttttaactcctttttatatgggggcaaaattctattttcttcttattggtacgttgaggcctagtgttgccataacaaaaatcttatccacatgatccaactctcctattggaaccactgaaactgtttctatgaaagtgtaccataaaatagcccatatgaaataatattcaggaagatatgatatagctgagcatctatttatgcacagttgacattttgaagtaattcataatagttaatatgtaataaatatatgatattcaagtatctgtagagacattttgagagagcttcaagtaatgatagaataacttttccttaccattattttatctttattaattttttcttaatattgtagttgaaaataagaagtggtaaaaaggctgaatctgaactacctctataatacttatttatgattattagaaattatatttgtctaatttttctgaatttgatcattctcttttaaaattttgcttgtagtattacaaattcttgaaaactggatttaaaacaaaaatctaatacaccttttattgaacgagatgggaatgatgctactacaatttatctaatacattgcttatcatgctgcaattgcagaataacaaatattttaatttgtatctttaatcaattatgtcttcatacctttattgcctgtagaagaacatagacaaaatttcatacagtgttaccttttaagacagatcaccatgagaatttaataaaatgactaagttaaatgtaagattatctaaatctataatgatttaaatcatctgttttttactaatgcatccagaagctttttttgtgtgtgtgggattaggccttatctgcaaataaactttggtagtgatataattataagagaacaataatatatttctgtagtctaccatttagtccatgttttatgcacgtttagaccattgaattaatctctgaaacaatagaaataaattctttactagaaatagcttgcttttgccttggctttgtggcaaagcgacattagggaacatatatggttgttgttgaacctgattgctttagcagcccttgggttgatagtatcaggttccagcctgccctgctaggtcaacgtggacccagggctttaaagagaaaagttcagggaaagttcacttctattgttttaccatggttacaaaacagaaaggaaaaaaaaaaaaagaagaagaaaagaagaaatcttgggcttgtgaccccttgctgccatgggcccattactggcttctttttgtttttgtcaattaaacattgcatcagagaaaattaaaacttacaataatctataaaggaatagaagccaaagtttattctattatcacttgtaggcaatcctcaaacatattcagtgactgctagagtcattgctataagtgtttaatttcattttaaatgttatttaaattttccattagtgaaatatgaaaaggttgtttattgattttttggggggtaaaggaaatagtttattaaaaataatttaacgctgactaaataggttgaaataagtatttattttaaattaaggggggaaatgtaaactaaagcaacattttcattaaaaaaatttttgtttaccttaaatggcaagaagttgtgatatgtaataggccagcatgtcgtacatggaacaacctctaagtttcttttgaatacagctaaaaattcaaaccaatttaaaatcctgaactttagactacaacctaaacttgcagaaatttttgttctaaaaacatttgccaagtgtttgttctgaggaaggtcaatgcaatgtagtttatttcacattttgtcctctgagcctataaaatattacagctaaagcagtatagctgaagctattcttattttaaaaatattaatgatacccataatatgtatgttatctatataccccagacataatcattgcctgatatttcaatttaatttttgtccacattttatttttaatatgaattgatattcaaaaaaaaggttttcagattgaagttctaagaaaaaaagatttaatttctgaaaaaaatatgatttaagaatatatattcaaatgaattaaaagaaatctacattagatatttcttcagtaaagacattatgggtcattttagaatttctattattatactaaaaatcctgtatcattttttatttgtcatgcattccaatgccagagatgagaagtgaaggggggattacatagaaccaagataacagatgaatctttgtaactctttggaacgacattagctatggttatatgctcatttgtttattgatcctttgctgttttggttaacataatttattttccttgaagtcacctgtgtcaagcatagaactgaactttctcatgatctagatagagtgtaataaaagaaaagggaagtatttaagtatctatttaaatgagtcagacaatgtagcaagtatcaaaaacattcctcatgtgacttttatcatatcatttatagtaatcaaaaataacattcgtgctagtcttatcataaatacctgctattttcattatcacactgaaatgacaaaattttaaatggtccccatattgcttattcttttaacatgtgaaggatagattttttaaaaaaaattaattctggtttgattacaaatgattattttaatctgtcatccacaccttttcaatgtggtttactcatgttaaaatgggaaatatttaatgtgtagaatgtttaacattgctgatgatcacttctgaataaaaaggactgcttgagtaaccgaatcaggtagcagataaaaagtagtttatgacttatgaattcagaggtcatctagtccttcacctgcctgcagacaggacttacctcaactattcaagataaatggctgtcttagatgttaaaaaccttcaagagaagagtctgtggagaccttccctgataacctattctaatgtttaactgctctaatgagaggaagaactattttttcatatctcatctatatccctcctgttgcagtttaagtgttgatacttatttttaatgttattttcatgctctttattgctgtgtattctgaatttattattggccagattttcccagtgcatgaagtgttagaaataaatttcatgcatttttcaaggatccagcctagtgtatgacctaaacgtgtattgcttaacttcaatggctttgcaatcctgttttctttctacttagaaccatttcttccatcaataaagagacataattatttacttttatatagaataactgactagggtattgtttgatccattcatgccccagtgaactaaacagctgtaatatgaattggttaagtaatatttaatttttctaaaatttaccccagaagtcaacttctaagtgtcttccaaaagggaattcctcaaagactatcaaaccctaatacaatttttaagtaaatttctttgctttgcagatgttccactgaattcatttcttctgctattttatgtaagaattttttagtaaagagggaagaaaggaaatgttggaagatttttaggcaggctgtcatgtgttttcctacctggccacctccaaaatgatacttactcaaaccttattttgtcttttaatctttcagtgtctttcaaatagaagcagttcaaaaatctaaattccttagtgtggcttacaagatcctttatgatagctcttgttcacttttccatcctgtttttcttgtaacactctcctcctgttcatcacacacacacacataaacacacacacacacacacacacacacacacacacacacacaaaaccctcatatttgaacctcactttcaggccccataaaattctagttctcattaatctctggggctttctatgatcctctgcgcatccctctcaatggtccaatttgcgtggcaccttttctttaaaatttggcaaagatgaaaagtccttgagatggaatctgaagggaaatgtaattttctttataaaaatcaatttattaatgtatttacacagcattatttcaaagtcaagccttatgatattttgaagtcaggaattgtctttttctttcttttcaatccctcttcagacaaataaagttctagtctctgttcccaataagtagactatttataatcacatttggatgcaagatattcataaaattacaaaaaatatatgtgtaagcctagacaacatggtgaaaccccatctttacaaaaaaatacaaaaattagccaggcatggtggtgcaaacttgtagtctcagctattagggaggttaaggtggaaggatcgattgagcccagaaattcgaggctgtagtgagccgtgatcacgccactccaccactgcactttgctctttgaggcagagcaaaaccctgtcaaatatatatgtgtgtgggtgtatttatttatttatacagtaatgttcccttatctgcagggtgtacatttccagaccttcagtggattcctgaaatggcggacagtacccaactctctatatactatgcttttttctatatgtgcatacttataataaaatttaacttacaagttaggcaaaggaagagattagcaatgactgataatgaaatagagcaattataccaatatgccagcatcactactctggccttttcacacccttattaaataaaataaggattacttgaacacaaccactgcgatactgccacagttcatctggtaaccacaagagttagttactaagtgactaaagagtgggtatacatggcctgtatactctggaaaatggacaattcacgtctcggtgggacaaagcaggacagcacaagattttatcacagtattcagaatggcacacgatttaaaactgtgacatgcttatttctggaagtttctatttaatgtttttggactgtggttggcaggggtaattgaaactgccaagagcaaaaccatggataataggggactactgtatatataacgcattttattaatcaagggaaaattttatatatttcagtgatgaattgatattttaaaaaagtacatatataagttaagtttggctatgaagaagttaaatcatttaaaaaatacggccaggcacggtggctcacgcctgtaatcccagcactttgggaggccgaggcaggaggatcatgaggtcaggagatcgagaccatcctggctaacatggtgaaaccccgtctctactaaaaatacaaaaaaattagtcgggcatggtggcgggcgcctgtagtcccagctactcgggaggctgaggcaggagaatggcgtgaacccgggaggctgagcttgcagtgagccgagatcgcgccactgcactccagcttgggcgacagagcgagactccgtctcaaaaaaaaaaaaaaaaaacaacaaaaaacttggaaaccctgagaaagcttattgacaaagtaataatcataagcaacattttaagaacatttagagaagaattggatgtagaaaagttggtaacaaacaatacttggaagatattagcttgcttatctgaatgttttgcaaaccatattacaagaatcactgtaggctatttaaatcttcaacgaagattattttgcagttattacacttagatatattcttcataatatattatatgttaatatattcttcagtttcataaatggtattgatgagattggatacaagaaagggtagcagtttgatatgggaaacaccagaaaacttctattcaaatgttttattaaatagttttcaactaagtattttagcccaaaataaaacatgcaatctctttctccagatctgtatttgaaaaaatgaaattatactgatttcagataatcctctctttaaaataataatttactaagttaatatggtcatattcctattttgaaggaattaagttgagaagtgaaaaacttaataaatgaactgctttgattcaatcaagtcaagcttacttttaataccagactttaatttgactatatggtttgcttgttgattgctttgttgttatagatcgaggcacaggaataagccatgcagaagagactatatatttcaaatgcacccttaatcagggtttttattttgtttttactttttttttttttcatttttggttttagtgaaaatcgccagtttgtttgttttttgctataaaacttaagtgctttattttaatttataggtgattactagcctttggagaaaaagaagttagattactcaccaagtatattattatgcttttccacttcagtgggcctggtgaaactttcttatgagctctctttcaaggataaaagccaaatagtgggaggtgtttttgaaacaccatgtgcccttgagtatggctcacttacccatctcttcatcctccctttcattgttctcctacagcctgttatttttaaatctagatttctgccattatcttctattaaagatgccaccctctagtctttttctccaactttacgtttacaccaatttacatttcattccatttccttgcttaaagttattacttttcttataaataaaatctaggtaggcttttaaggcccttggaaatctgattacaaattatcctctcttaatttcatcttctctagatgtaagagcctaattattacgtctaaacaaatattatgtcatgcctttgttctgcttctgttctctgggattatttgcctctccttactttcttttcccttgccaaattccagttcactttcatgaccaagtgttcagggaggctcagggctactccttccccaaagcccaccatctgcatttgggcaccgtgtacacaggctcactttcaggacaagcccagtgcaaaatacaaatgtagggtcccttattttaaaatggtaagaattcaagatgctgacagcagagcattaaatccagcagaagaaactcttccaagcacgtgacttgtgcagctgcacaggttgcatgccctgctgagacttcctcaagaaatgctcccatagcatgtagttcacatctttattatgttgcatttacacagcatgcttactgcatgtgtatgtatgtgcctgtcaccccaagagcttgcaagttccatgaggggacagacctgtcttaatgttctttcaagtcctttgacctagtcaatttcctcacaggaagagatactcactaaatgtattaaattaaatgtgaagatgactatgggaaataaaaacattcaaatgtgtgtttatctaagactttaatatcaaataatttgtgaaataaagtttttagatatattaaaatgaaaatcatagtttatcaatacggtctttaaaacagtttaaatagcgacagtaaactcttactgtaccgaggcagattcattataaatgtgagaattcagttggaaatagagttgaaagaataattctaggacatacagtattaacttgactttaatatgagaattaatgcattttaacatttttcaactttatataatacttcaaataagaatgcatattttggtctgaaaaaaatagatatagaataaaattgtgtagtgaaaaaaattaccacaagccaagagaattattctgaaagaatttaggtgagtgaaattatcaagaaaacatgatagttcatattcgtgaagaaatcaattttatttttgtatcaagccagtgcttgaaaagaatggaatatgtccaagtaatcacatcacatgtttttgctaaatttcagataattaaaaataaatagcaaacaaactgggaaattatgtcttattgttttgattatttcaaatctgaatatttgcaaatatgctatctttgttgggatttcaattaagcaggctgttattaaaaatacatctcactgtaaaaaatataaatatgctacccaatagatttcaattaatactaagttcttaaatggatgaaaggctaataatatgttttaattaatataaagattaataatataattaataatatgtttttatcccttttgttgtcctgattctttatagaaaatcaaggaagttgtacataataaaatgccacttaaaaactctaagatgatatagggttctattgtgagttctgtaacattcgcattagaaaatatcctattctgactgaatttttacatgacttgaagctggtggtaaaggtagagaatatttatgatgacaaggttttgatcactagatttcttgattgataagaaaaaatatctgatagtttctaaaaagaaaaataaatatatgctattgtacaagggtacagaagaaaaaggatataaattgaaggttagttgttgaacaagtgtgctatggagaaaagggaaaaggagatatgaatagagaagcacacttacagaatttgtatgaaccatatgataattactaattgttttaatggagacttcatgacatgctcagaagagataagacttgatttacttgattctaaaaaaaaaaagaaagacttttcatatagagatctaagtggtaattccaaagtcttttggctctttaacatcagaaaataacttttcccaagtttttgctatggaaggattggaggagtttctttggtagctaacaaattgcctatctgcctatacattcattgataggcttgagctatgtgaattcaatgaagaattcaaatccataaaacattttttgaataaattcatttttaatgatgtttaatgattttttaatgatgagttctaaatgatgttaaaccactgtcttccatacacttcagcagtccttatctacttataagcaagtgctcatttgcagacaggtttgttagtttcttcaagtgaagcccaatgtgctgagagagttgtagccaacaacatttcggtccctaaatagcgctttagagcattttctagtttctggttgtggactttattctttttcccaacccagagtcattgaataaataaagataaaaatcttaacacaaaatattattactagaggaaaacgaagtccaagatttatgacagtctaccttgacaatattcactctgtacttagctgtttgataatttttggtcctgtcctacaccttatatcttgaacagcattatctccaaacacaatggatcactctttatatatgtgctaggaaatatagcttagtgctagtttcaacatcactaccataaaaatgtgaatgtaaatgaatagtcttttaatcaaaatgtatcagagaaattaccgaatttattttatttttgtattttatttttttaattattttatttcttccaaaatgattttagaggaactaccttcaaaccagtacaaatatttcataaatagtatctggccgatttctagccaattgagcaatttgttgcacaataagccacctcatgtctttcagtaaaaaataacattaagttcaaataataaagacgttacacaataaattaggacacaattaaaatttgctttaaatatttcttggggggaggggacgccatacttctactcaataaagagaaacattttcacagtccagagatcttttatttttattttttaaataccttttaagccatgaatccacagggaagaggttccagcagctcaggctccctgccatgggttctcataaagtgtgcttctctgggtggagcaggctggtgcttcagttgcacccaggtatgtttctctttggcttccttctgttactgatcactttccttcacacatttcaggaagctatctcagctcttagagttcttcatatactcagtacgcacattaattctctttgcaagaagcttgcccttaacttgtttaaaacaatgtcaacagcatgctggggaacatggtagactcttccagttttgccatggtaacacctgtggagcattcctttttgaacagtacgcattctcttgatgtctacaatatcaccttacagatttgcatattcgtggccaaaggatcaactctatgttgtctcaaaggcctagagaacatatatcaggtgcctctcttctttccctttgtttttctcattttgatgaattactggaagatggcgggtccagaaaaaaggactgcattgatttttgaagcaaagaagcatacttaaatatattgtattttttaattaaaatcggtttgtctctacacttccttatttgaagagatgaaatgtcatcattaagtagtttgaaagtgaatttttatcactctattttgaactcagtaaaattttttcacattgtaataacttcattttaggcctgtattcatcttcccctccatacttggacagacggtcttggattatttgttaataatcaggtacaatatttagtaagtcagtgtttatcaatatatctgtcttaacatgtagacttcacatagctggtaccatcatttaaaatccaactttctctcctcttttcctcccctaagggtgaatgcagaattaacttgaaggagcagatttgctgtgattaggggtctactcttagtcctatgcagtttccttaccctactcataggtgttgaaagctttgagtttcttttcacataaaggttgtttacttctgatgcattctatctgcagttgagctctagcatacatatgctcttcattttaagtatcacaaaaaataattatgttatttatgacgcatcttgtgcagtcagctttacctgcagcaacaaacaataccaacatctcactggcttatgacaacaaccatttctttatatttgaggactgctgatcagggaccactctgctgagctctgctatggtctgctgacccatgcgctctcatagaagacaacagaggctcaggaagggacagatctatgttggtccatgtcagacttcttcccagtgacggtatatgtcacatctgctcacatgtcattggccacagcaagtctcatagccaagctcaaattaaaaaaggaggaaaaccttctataatgaagaaagtgttattctcattctgcctatgtgaaagcagggcaaggtcaggaagggaatagctaattgtgaataatacatggcacttattagtcaacatgaatttattaaatgcccattatcttttgactctgctaagatactatatgacacacaattaagaaaattagtccttgtttagaagtaaatttttaaaaagagaacagtttaaaaatgattaaatcctaaccaactactgctttacaatctaggttgagatggcaataaatatgttagactataagttgttaaacagatatttgaaaatccagtcatatatattcctaattagctcctgaataagagtggcaagtctctttaatatgatcctcatataacctcttggaatgttatggtctaataattttttctcttgtgcaaaattcttgtgaattgattaaattgactttagaagagatctatttttttctcactaattttaaagaagtaatttatggtttaatcctttaaaataaaattaactctcgatttggcagcatcatttatgctgttgtcagtaccaccttttcctaagataattattatcatgtgtttcaggaaagatgttagggtatatttcaatgcttttctttttttaatcagcattgttccctgtctcaataaatctctattattatacaagttcaatgctaccttttgcgtgacaatattttctgcttcaatgtagaggaaaaataaatttaaagtaattactttcagaagtttattgttttataggactgttgtaagtatataggatgcaaagcatttgttaatgtttgcttgttaagctcactgaaggtagatgtttatacaagcccagaattattttctttcttccctgttccaaagtacttcaagctaatcaaggaaataattcactggtggcaaactttggaaattgtttcataagaaatctagatttaaatatgctgtatgattttcattttaatttagtaagttaaaggggaagtttatataaaaatgatatgcaatttaggatcattttaaagttgagaacttcatatatttcaagtctttagatgtgaataatttgagcttggtgtatacatttcttgtgacttgcgtaacttttaaaactaaaagttagaataaaatggaaaaacatggattttgcatcattttatatatgtgttaaatactttatttatttatttttttggataagaagaagaggaaaaagagaagacagataacagaaactgaagctttcccatgcacacgcaggcatgtggagttggtatcatgacacttaattttcaaatggaaaactttgttttagtgtcgcaagaaagcactggactagaagtttaggctcccctgttgaaaagcaactatataatcaaacactgtaaaacagtacggaattgaacaaaccttcacacctcatcatgaaatctgaatttttttattactctgaattaatttacttttctgtttacttacccatattttatcatctcacacaggatactttctgatttttattttcatctttctacctccagaaactctatctgtagtttagttttagtccatcattttagtgtgcattttagatttcatctccaaaccctagttacttccttaactacctcctatcaatcccccttttgttctgtcactatctcccatttccttttttatttgatttttctggattgcatctttgatgtttagatgattttcacttatatatctgaacaaggaatcatcaaatagaaaatattttgtaagaagatacagagatatatgcatcattcattataggaaaaaacacggttactaaagtactacaatttttggaaaacaattgcatctaaagttatatgtattaattataactctgattgtcacatattatattgcattatgaaatctcagatttaaatatacacttacctaagaaaatgtctcgattatgtagtaatttaataaccatttatgtttattgacttcaaatagcttagtacatatatatgaacatttattaaaaaaagatttaaatgaatctgtgtttttgttaagtaaatgctatccttgcttgcatatcagttaataaccttttgcatctgccttatttctgatgtatgcatgcaaattataaacatctacttatgctttaagatcagggaggattgataaaattttattagcaagtcagattttaaattttaaaaaagtcaagtgctggttttgtgttttttattctataattggggaaaggttcctagaaaatacttcactaaagttaaaatttagaaatccatggattttgcatttaacttattaaaggctaatttactttgaacttctcttaactaattaaaagctcagatagaatcagggatgtggaaagtttggaaacatcaacttgcattaattttgttttcaaatataaagattttattgtataccctaactccatgggaggtaagaacatcttctttcttgccatattacagtattactatatctgtgcattcagggctgtccaggtagtcacagtgacttaacttaacctatggcaagtccttaaatgtaactatgttcattaggactgcttatttctaactaagcttgctctctctctctctctctctcttttttttttttttttttttgagatggagtcttgcagtcttgctgtgtgtcacccaggatggagtgcagtggtgcgatctctgcttactgcaacttctgcctcccgggttcatgtgattctcctgcctcagcctcttgagtagctgagaatacagccgtgcgtcaccacccccggctaatttttgtgtttttagtggagacggggtttcaccgtgttagtcaggctggtctcgaactcctgacctcgtgatccgcccaactcggactcccaaagtgctgggattataggcgtgagccaccatgcctggccagcttgctctcttaacagcaggggtggcttcctgtttttactaagatcaatttttttctttgccttttcttatttcctgttctcaatgcatttgctagctccattgacttcagcatatatggaggatgccaacgtgtgtccaaacactgtgtgtctcgtgtgtgtgtgtgtgtgtgcacatgcatgcacgcacacacacttttcacagactttcagaatgaattatcctaagtggtcaagcaaatagtgactagaaaacaacaaaaaataattggtaaaattaaaacgtgtaattaactgttttaagcaattcagactcagaaatgtagttaaataagaacaggagcattgcttttaacatttttttaatgaaagtaaaaatatccattttgacataaagtgagactatagcaatttcatatagttggctataaaatatagttggaaaagctgatacaagttttgatatttctttgttagttatgcgttcctataaataagaccaatatgcacactcaaggcatcccttcaaatatttcttcaaagcttatgaaaagttttgtgtgaagactgaaaacaagagaaattatttggattgatgcaataacatcttgtccagcaagattctccattcttttttcatcgtgttcacattgacagtttatataccaggaaggttttgttcataaactactcaccacacaccacccattcaaggtagagtaaatcctatcggtgaacccaataaaagagtatagtgcttttactccaaagaggccatgccttctgggaagatatactactctttgtcattcaaccagggaagccttgagattgaataaaattcattgttgaagcctaaagaaggaaaagctagtttttgaaaaagtcaggctaaatgttaccaaaaaatgaaatacaattttaaaattgactgcttggaagtgtaagtaaagaggagagattttaaaatgtagttagcaatcctcgtgtctatattcatttttatcttttttcctttaagaagtttttgacatagtattttctggtaaaaatacttccttgcaattgtagctccccttggtatacaggacttttgaaagctgaatttgccctaaagtattttagtttgtgaaagacaaatagccaagttatatataattgtgaataaaatctaccgttacaatccttatgttcagtcagtttagaatggatttctaattatttattttttctttttacatgcacttctaaaataaaggtcttctgtacatacacagtttacttctatccaacattttcagagtattaaatgttttagttttccctggtgtgtgaaaaataattgttttttaatggcactaaatctacccctggatcccctagtaccttccgtgtttctctgatttaaaaataaataaatagaacacaaaatcttgttcactgccagatatttaaagaattttaaaaactagtaagaaagtaaagatttaataacatattgcatccacaagaggaaaatactgatagcctatacaaaatatgatcatactgttgtctaacctgttgtaacacataaaaatctacaatggacaggtttttgtatttttaaaatctagatttctataatatatattttaatgacttactataatttcagtctagtatacaccgtaatttattcaacctaacacaattatatgagcctttagggttttatttttgcatattctctctctctctctcattatttcttcagaatgaatttttagatttatcaatataaaagtgttggtttaagtagcattcatattttaaatttcaatacagaggactaaacgttctttgagaaatattatattctaccagtgtcgtatcagtatgttttagctttgccagagtgatggccaaagtatgatattttatatttgatttgatttttaattccttatgtgctagtgaaattgtaaatcttttaatgtttattaactaattacatatgtgtattatttttctattcatatgcatttgccatttattattggatttttcatttgttttattatttacttatttatttatctatttttaagacggagtctcgctctgtcacccaggctggagtgcagtggcgcggctcactgtaacttgcacctcccgggttttagcaatttcctgcaataattatccgtcttttacatacacatttttcttctttgtcgctttatttcagaattaattgtcttaaaaatgtttttaatttgtatgtgtataattctatcaatcatttactcagtactttctggcattaatgtcattcttataaagtattattccaaatatagactttttactcatttgtaatctgtaatctccttttaaaatgcataaaatcgggctctatttcaacttttcaaatagccagcaaattttaacaccatttttaaaattaatatagccttccaatggtattaaatgcattattttaggactttcatatattaccatgaatatataagaaagaatctctgagtacaaaatgtgctattatagtttaaaggtggtttatttttgataatctagaaccctggactaaataatataattaaaaattgacacttcattgtaaaagtataaattaaaatttaagtacatgtgtctagatttgtaagccatgtttaaaaatttacatatttgggcatagactactttggttgataatttcaagctctatagattgctataagttgaaaaatttatggatgattctgtttccaaccacatcattttgaagagctaagataaatccagaatattcagtgggagacagggtaatgcaaagaaggcactaactcaaaagccttccactttatcatcattatcaagttggcgccatacacaacactctgacaagtcggagtaccatcctttcaggtctttaaataactgctaagacaatgttgattcagatggccatagatcagcaatgtgtatccattccttccttcacccagtcattcattttttttcatttaataaatatttatcgagtccctactttgtgccaaacattgctcctctaaaatggggatattccagtgaacaaaacattcaaaatctctgccctcatgaaatatgcaagacagatagtcaccaataaacaagtagctatgtggtatttctgaacaacactgaagataaaaacacagtgaggtgggagaagggaactattaagtggacccagtgcactttgcgtagtggttggggaaggtgagacatggggatgtttgactgaagagcattctaagcagcagcaacagcaagtggagacaggaacattcaattctttttagagataatacgtatatttttaaatagtaaatatattcagagtcgtggaatagcagtgcagtcttaaaagtgaatttcaggccgggcacggtggctcatgcctgtaatcccagcatttgagaggctgaggtgggcggatcacctgtggttaggagttcgagatcagcctgaccaacatagtgaatccctgtctctattaaaaacacaaaattagtcgggtgtggtggtgcatgcctgtaatccctgctattcgggaggctgaggcaggagaatcacttgaacctgtgaggcagaggttgtagtgagccaagattgtgccattgcactccagcctaggcaacaagagtgaaattctgtctcaaaaaaaaaaaaaagtgaatttgaaaaattatctagatatggctatttgcttctgatgtaagttacttaaggctgaaacatttttatgattagcatggcaatttagcatggacttttgcacagacaggcctggtcctacttctttagcagtctgtgatttattcaagttacttattctctcataaggaaccattccattcatctctaaaatgggcataatgatgatagttatatcatagagttattgtggagattaaattatataatgtgcatcaaagtgttcagcataatgttaattacactgtaaattcagttattattagatctcatgatttcttaaaataatttcaacatccattttagatttgggggtacatgtgcaggtgtgtcacataggaacactgggtgatgctgaggtttggggtgaagatgaccccgtcacccaggcaatgagtatagcccagattggcatcccttagcccttacgcccctccctagatctcattgtttttcatccctatcttgataattacagctaaattaattttcatgctaacctcataaaaacctattaaattatgagcactgtacttcacatactatcacttcctaagtatgagtgtcatagtagatcacacatggcccatctgtgaaggccctattttaaacactcaatatttgctttgccttttacagtatgatctgcagttgccaaactcaaccctgttggttgagttagccaaggctactgaacaaacacaatttgctgccctctgtaatggacagtggaggagggctttagaagaaacaagccttggtgattatctcaaaggacttgcaatatagctgggagtagcataagaaacatagtgaatttaccgaaatggcctcactgattctttgcagatggagcatttgttgaggcctggacacactcatcatttctggtgaactccacatttttctgccttggagcccttgaccatgtcatttgaaaatcttcaatgcattcttctcactttctctctgttagttaaaataatactcacgcttgaagactcatcttaaatgctttttttgtctttaggttttctgagagtttcttctctttttcctttctctttctaaagtcacttaaagcttagtgtcatagctatgtattctaacaataagaagacgacttttggagagagggttatattttgctgccttgtttctgccatggtatctagaatcggcctttgcatgccagggtcacctagcacatgtctgtgcactaataatgttggaaagagaggacgcatttgaagtgagtcatcagatctaaggtcctggactgtaagggaagtttgaccaagactgaagccgtgttttaaatattagaaaatcctctaacaagcaatgaaattaaaaattgactgaaatatggaattctgtcttctgttttaagaaatcaaaatgtcatagctgttgtcttttctagacttctctctaatgtaatgttagttacaggtttaatcaagaaactattttttttcaatttgaaataataagaaaacttatacttttattctccataattctatgcttcaatgtatctttgcctcagtttccacacttataaaatggaaatagtatttccatcccagaagtttcttgaattaagtgaaataatatacataaagtgctcaaaagaattctagttcatacattatgtaatttctaaatgtgagctattatgctttagccagtttaaacaacgcttttaaggcactatgtttttagtattttaaaatatgattcagctataaataaataagggaacatgggaattaggataatgatcaggattttaaaagcagcctcagcctagtattccaggagaaaaaaattccatggtaaaacagtgtctattcaagcttgaaaggacaggtgccaatgacttctccaactctgtggttccggtagtttatatcttaatttcttataacattgaacattagtattaaaaggtcatttattaaagaaaatgcttcatcaagaattaaataaaattcaatgaatgtaaatcatattaacagcaatgtttggtgcataggtaggtatcatctatgtcaggtaatgaattaagcaggttattaaatctctgcaggctggaaacagcctttgtctatcttaacatcaccttttcattagttcataggcctggaatcctcacgggggcatcaaaaagttgtcaggaggtctctgaattctggagttggtgtctgaatttgtgcttcaggattacgtttcttgacagctcctcatgcattacacagtggaggggaatggcggatgtgtgtgtgcttgtgtgtgtgtgtgtgtgtttacaggtttctcaaacaaattagttatgtacattttctccagaggtggcatacaaataacttgtcagtgaagggtgaaaacatgcattttaggttgcgtcagccatcttgcctctgcattcataagtgggaagacaagattgtctgagttctgatttaataggtttttttaccctcatttgagactacatctctaaggagcaatcatttaatacaaacaaaactatttttctacttttgtgatttatatgtgaagatgcttatacagtaatcccctttacccatgggggatatgttccaagaccccccatggttgcttgcaagtgtgatagtacctaaccttatatatgctgtattttttctatacacccatgcctacctaggataaagtttaacttataaagtagacatagtaagagatgaacaacaagaataaaatagaacaagtataaccatacactgtaacaaaagttatatgaatgtggcctctctttctctcattcagagtttcttcttgtaccatacttattttcagacagcagttgaccactggtaactgaactcgaaaagcaaaaccaggccgggcgcggtggctcacgcctgtaatcccagcactttgggaggccgaggcgggcggatcaccaggtcaggagatcgagaccatcctggctaacacagtgaaaccccgtctctactaaaaatacaaaaaaaaaaaaaaaaaaaaaatttgccgggcgtggtggtgagcacctatagtcccagctactcgggaggctgaggcaggagaatggcgtgaacccaggaggcggagcttgcagtgagccgagatcacaccactgcactccagcctgggcgacagagcgagactcttgtctcaaaaaaaaaaaaaaaaaaaaaaagcaaaacaaatggataagagggtattatcataccagattgttgaatgtatgtgtgtgtgtatgtggacttactttactaacttttaaagttactttaccagtaatttatggttatggctgctttattttataaagatttatgcacactcgctgtagttttttccttcttattgctggtttgctataatttctttacaaaatgtgtccttcttatatcaaaaatatgacaataattttgattaagattaagataataagtgattacagaaaaatgagataaaacccagttgagtaatgaatttccatcttatgaatacaaatccctattacagtaaagtattgaaggggagatggattcatttttgattagattcagattttgtctatgtagttgataatataacaccaaattgtgttctatttaaattcttcttaaataaggcatcacaagaaaatacatttaaaataggtgaacgggctgggtgtggtggctcacgcctgtaatcccagcactttgggaggctgagatgggcggatcaagaggtcaggagttcgagaccagcctggccaatatggtgaaaccccgtctctactaaaaatacaaaaattagccgggcatggtggtgcacgcctgtagtcccaactacttcggaggctgaggcagaagaatcgcttgaacctgggaggcagaggttgcggtgagccaagattgcaccactgcactccagcctgggtggtgacagagcaagactccgtcaaaaaaaaaaaaaaaaaaaaaaaaaaaaaaaaaggaaagaaaagaaagaaaaagaaaggaaagaaagaaagaaataacacaggcaaacaaatcatgatatcctaaagatgtttgactaataatcagtgcctaccatcatatatctaacacatttctcaaagtcagaaatatgcagacagtacagacagagaagatttgacgtataaaactattagagaataattatgtgctggactgtgtgagactaaccatgctaaggatggggaaatgaaaactatttcaagttagataactacctgctttgtaaacctttccctttgacccaattaagcaccaaacattgctgttaatatgatttacatttattgaattttatttaatactttatgaagtgttttctttaataaatgaccttttaatactaatattagatgttataagtactcaaatttgagtacttcagccttcattacagaagtgtatgtgtgtgtctgtgtgtgtgtgtgtgtgtgtgtgtgtgtgtgtgtgtaatggggggctatgcctctatggctgtttcgttacttagcaccccctcctctccttcagttgacaaactcctgcttgctcatacctcatcttccctgaagcacccccatgactttgtcccaacaaccatgctctgcaacatttactacagtatttaacacggtttagtgtaattctctatgtatcgatgtatttcccaaaatagaccatgagctacttgagggaaggtatagtattttgttgttatttccaccacatattaaaaggtcaggcacatggacatgttcaattaatgtttgttgactacattaacatgcaaatctgctacagtggtagtattacactgtgctcagggcttggcatctgaagccagattgccatggttcacaacctgactctattacttttaatatgtgtgatattaggtaagtcattttacttttactttctgggctcagggcttggcatctgaagccagattgccatggttcacaacctgactctattacttttaatatgtgtgatattaggtaagtcattttacttttactttctggtgtctcaatgtctcaccaaaaaaataaggattgtaatagtacttatctcaaaagtttgtcaaagtattaaaagagttagatcacatagtgaatttagcacaatccctggcagtagataatataattgcaattatttcgttattttatctactattcaaaaataaaacaaaaacatttggaaaagcagcctttaaagtgttggaaatggcatctcctacaaaggaaagttggatattattttgagataggagcaatgggttcatattgggaccaaattaacaataacctgaagaaacagaatgatggtcgaccatttccactgcaagtttataaacaggttcttcgcatatgccattgaaatgaaagaccaaatgcattgcttttggctcaaacaaaatatagccaatagtaattgctgtgaatatcttgtcatttgaaatgtaaattgaaaaattacaaaaggaaaacatttttatttgtgattatggagttcatagttggtgtaaaaaattggtttagatactacttggggtctcacttagtcatccaggctcgagtgcagtggtttgatcacagctctgtgccacctcaaattcctgggctcaagggatcctcttgcctcagcctcttgagtagctgggactacaggcatgcaccaccatgcccagctaatttttaaattgtttgtagagatgggatctcgccatcttgtccaggctggtcttgaactcctgggctcaagcaatcctcctgccttggcttcccaaagtgctgagattataggcgtgagccaccgcacctgggcttggaataggttttaatattaaatttaaattttctagaatattgttgtgaggtatgacaggagctttgagaaagaatccaatatagtattaacgttttcccaaactttaagaaggccacttacaattgtttctaattatttcagaatttgttctttaggggattctagtaagcttttgcacataattgtaaaagagaggtgttgtgggtagaatcatatgtggcctggaagacttacgggaagaaaggaaaactgtaaggtgattaaaaggttaaaaatatttagctttctagacaaacatgccactaaatgaaatttgcaaatggtattaactctgggagaaatcatatatgtagatgcataatgtatgctatagaaaggtaaacataaatagtattaaattgtatatctctttaaaactttaagttgcattgaaaagcatttcagtctcacaaaatattcctctgtatttttgtgagtgtgggaaagtaatctgtttgatgcatttacttatcaagtggtaagtgacttgattcactttataaagggacatttaccatggatgtaaagaattccagttgaggcaagaatatatccatctccctgatctgataaggttaggctccaaaaatatattcattaagttaacatatcttaaactaagtttaatataatacttaatatattctaagattagtataactaatatacataatggattttaaatatcttcttaacttagaccttatgtatattctaaaaaaggggaagaggacttagaagctttaggggcgagggcgagggcgagattatcccaactacctacgacaggaactctctttagtattttaggctgtcattaatttttaacacttaatatacaaatgcttaagagtggcttagttacattccaatgtgttttaattctttctttgggggtaattccttattcagtatgtagtagctccaactgagctggagacttcagatattttgtctttggctttttaaacaggttttatattaaataaatttcttgtactattttggttgtatacagtgtgacttttgaggtcagaggccacaataatttatcctcaccagagtagctaattttaacttctgtttattttttgttaacgatgcttttagtttactgatattaatttttttgataatggtgaactcttgcatttcctctggtagagagtaaaatgtttcaagttagatgatcacctgctttgtaaacctttccctttgacccaattatttcttacattgctcagtattcaacttttacagaatttggtcaaatatgtatgcagtaatattaatagataatggtaaccaaaatgatgaggacatattggtgtgatgtaagggtaaagccccccattctggcatccggtggaatatgtgaattgctgttttcctaacttttggggaataattctcatgtgccctatgacatatagaacatggtttggtactgttgagagatgagaaattttcataattcaaatgtaaatcataccattgattatatcacatttgtttagagcacaagtctttaaacaaacaacaaacaaacaaactcactagcaatggcaggtttcatggtgaactaagtttagtaaatgcctatgttaccccattcttggaaatttgtaatgcatattaatatagtgaaaactctgataacttgccccagtaaacaaaattaaaaacttcaggaatctgtcaagttcttccacaaaacatacatatgcttagtagtttaatttgaacacagaatcttttaattaaaatatactttaactttttccccagggaacatttgtattttgcatatttgtgtatgtatttattcatttggtgtactgaattacctgccatgttaatagttgagagagtgcttttgtgcttgtgagccaataagctgaaagtgttcacaaggtgtccactggtgatatttgtaagcaggtgccccatggacctctgtattttggtgagtgtgggaaagtaatctgtttgatgcattagttcatagtctgtttgtactgagaagtgcacatgactgggacacacaactacacagagaacactaaaagtccaaacaaatgtggaacgtgagaatgaaaatatgttcacattagtcaccattttaaaaagtgtatccctcaaagctttacgagcaataggaaaaaatttgcattagaagggaaaataatgttaatcatatagcttctggatgatttggattgttgcctctcaggaaactgaaaaaaggaaaagttcaactaacaagttaacaacatctttctaagggaaaactatgcattgataaactgaggattccaaatcagccgcttcttttggcgaaatattgatatacatacattaatcttaggaagtcctttatatccttttgtgctgttgggtctatttcctgaggtttatttaatctagacgatgtcagtgattatttgtgcttttcatagtttatagttctcacaaggataatatttttgtttataatcatctgctttttagcagatattttagaactcaaatggaaaggaaagattaaaaggacaattatatgtggttaattatatgagatagaggcaaacttcaggcactaataaagtttagctagggtcatgatttgtccacaatgaagtctctgaaaaatatgatccaagttgttgaagtcaaattagttttaaaagtttgttttatgttggggtgcggtggctcacactgtaattccaatgctttgggaggctgaagcgggtggatagcttgagcccaggaattcgagaccagcctgggcaatatggtgaaactcgctctttacaaaaagtacaaaaatcacctaggcatagtggtgtgtgcctgtagtcccagctactcaggaggctgagcggggaggatcacctgagcccaaggaggttgaggacgcagtgagctgtgatcacatcacggcactccaacctgagcaacagagtgagaccttgtgtcaaaaaacaaaaatttgtttttatgttttaaacataatgtatgtttatgacagagaaacgaaaatcttcatatgtaaaaaaaagtaactctccattcagagttcaaagataagcattcagtattttagcatatttcctttcagtctttttttctatgtatttattgcttcctttacttgatttctgtctcatgtgctctgatacgcccatatctgcaggtttgtatcttactttttcatgttacttagaaagtaagcattcctgtatgttaccataaacttataaacatgactcttcatgattccataatgttcaagtggctatgcaaatcattaagcaaattgtaactttcccatcagaaataaattatttatatgtgtatatatataaaatgtataatataaacatacatacatatataaagtttacaaacctcttggttttgtaggagcagtttcctagaaaaaaatatgcagaatataaccacagagttggaactttccttgcgtaaatagatcggagagggccaatgaactcttgcagatcagcagagcaagttgctttcactcgtaaatgcttgtttgtgtcccaggattaatctcagtgctcatttgctgccatgtatccttctgctgcacttaccccacagattatttaattttattgtccttcttatagaagggcttgtgtctttattattgaaaccctaatgtctagccctgtgcttatatacagtagctcttttctcttgaataaatgaatgaatgaatgaatggttgaatggaacttttctttcctttctccaggcaggtaggatttggacttaaaatttctgctgggcagctactttcacattttccaatgtgtagacaccacagtttttgtttttgtttttctgaattttatttgtttctctgccccaactcttagaaagagaattaagcttaatttctcaaaaactactgaagagattaacaaaagatgatgtccacaaagaagattggatattgaaaattctataaagtactctaacatctcttgctcttttgcactaagcttcttattaattactatcacttttgttaagttcaattttgacttcaccttaaataaaaacaataaatggacctggaaaagttagtaaacattatacagttgtaggagagagactgaaattagcatgagattgatttagtgttataaactaaggaaagaagacccccctggcgatctgtctgtgtgtggcgggttgggaatgggagtgggtgggaaagctttttatttagaactgcaggagaaagtgtgcttgggtgagttccctagtgtttgggatattaaatgtggatgtggacatctctaagctattgctttcctcttttaatgcagatgtttgaaaatactaaagcctgtactaaggctaatgcatgaagctggcaaaaacaattaccaaaatcataaattgtgattttattcaagctattaagtgtaattatttaagtgaggtcttccgtttgattagagctaggagagttcagcttgctctaatcctctgggatagaaatgggtcgctcttatagaaaatgatgggttgatagtggctactattgagataattgaacattccagaagaaaatgcttttttcattgtttcgcttcctcttttcagttaagtttttgtttttctaagtattttctttttaagaataacttatttctaacaaagatacaaaacacttcttaaagaaatcctgatttaatcaagttttctaagttaggtagcttggtcaagtctacaccttctagtaaattggtagagccagtatcacagctggatcaatccaggcaataaaatctgtgattttggccagagtattactcatgttctcttggaggttccctaaaatgcctttgaaagaaatttaaatattcaattattttacagttatcttccctgaagtattcaaatcccctaggagttaatgaccaggattgcataaggataaaatatcaagcctgtcaataagggaacctaactgtaggttgtgaagggatagagaaaagtcttgttaataaataaattttccaacttctcctcagccaagaagttgggaataactccaacgagaggttcatagttgttgtcctgttcttaggcaaaagaataagtgatttacttgtccctacaagtattttctttcagtccctttcattcttcgcaaaggcatctcacctaattgaaagtagtccccagtagggtgttagctgatggctttagggtgttaccaccaccaagagtatttgcattttaatgaaaggttttaaaagaacttaaagcttaaagactgaaagcaataaatctctattggtggaatttgaggcaatgtgatagattgggcaggagatatctgtggtgaaaggagcccaccgggtctattctaatcacagcgtgaattaaagtgttcctacttagtagcctcacttctacttccagagtgagggctgtggggacaattcctgtggccagaataataaagtactcctaagtagtttgattttctttaaaatcaaaacaagttaaagggctatacatttcaaatcttttaacttccttgttctttcccactttttctgtagcatcttgcttgagatttcccaaaccctctattctattttctctgggcttgagaagtatatttagcattacgtttcaagttagagtttcaaactcattctgtgccttacttttcatttcttggaaactttatgaccctggaattgataaggtagtatacttgaaggatttgggagaaatggctttacgaatagggttattattattatttttattattttactacatagagtgaaccagacactgagctacattttaaggacacacagatatattttgtgcaatttctgtcaagtagccttgggagataagcaaataatccgattattgcaatcagtgcaggaagaattataggttccccatgctctatcgtagagcacagaaaaaatactaactagaagtggttggtaagaaggatgattaaagtttaggcaggtttagtcagataaaacaggaatgaggattggttggcatagaaaagggctttgatggcaaaggaggcagcatctttaaagacagtgtaataggagaccagagccactcaggaaactgttaagaaactgagtagggccaaatataagctatgaatgtaggaataaagtgttgaaattggaaaagccgtcagggaccaaatattgaaatggctttgatgccatttcaaggattgtgaatccagtagggaaccactgatatctttaagcaaatggaaagcaaggtcaaatttgcattttataaaaatccttctggaattagcatggagagttgtttagactctggactctagactctggagtgggacaaaattgaatgtgtgtcttggaagagtttggaaagctgtaaccatgtatcaagaaatgagggattgatctggaaggtaggagtggggatatagaagagaaaatagattagaaaggtaacctcagaaagataatatttgagtatataaaagaaggaaaagacacaagtgactcctggatttttggcttagtcggttggattccatttcgctgaaccaggggaaagcaaaataggtattaatgggatagatgctgagttcagatttagacaagctgagtcttagattattatagaacatccgagcagagatttccagcacataagcattcatctgtctgaatcccaggagaaagatatgggctatagatatatatttagcccttagcccttagcatctaagtgatgctaatagaagagatcactcaaggaaaatggatactatcagagggctgttgattgaccacagacaactaaacaagagttaaaaagccaactgagaatgagcagcaatcatgagaaagtaataataagaggaagtagcttgagggatacttcaagaacaataagcacgacaatatccctatgggttaagaaaacacaaagacaagcaaacagtcttgctcgttttccaacatcctccaggatctagccctaggcaataactctgaaagtctcaatcactgctcctcttcctatttgacttgtttcagctcatttgaaacaatcctgtatatccatacatttttcatggtttcatttatttctcacattctcactggagtgtaattttcttttattcttttcttctccatggttaattcttcttcagaattgtcttctaatgttcccgctgccttcttccttcctatgacatggtagtatcatcatccatcctaacttccaattagtattcagattgcaactttcttatgggatttagcactttacaatttgcatcatagttgtttatgcaccagattcttcccctttggcaagaatacaaacttctgaagtctaagaacccgttctcctaaattagcctccatagtgcacctctttgaaaacagcaggtacttaataattatttgctcaatgaccacaaacattacctacctaaattaaatagataacatctttgaatcttctgataagtctagggatctcagccaaggcaaaacatgaaaatgcttatttatgaggttatatctgttagttttgaaatatctaggcacgttttggccaaataaatgatgggagagcatttcataaagcacatttatgatacagaggcagaaagtgaaaacacaatgctaaaactttgttttcaaaaattgtaatattatatactttaggttgttttccattaatgattgccaatagctgtctctacctctgcttataactgtaataattaatcttgtgcaataggcatgtaaagtacagtactgctaaaacacaaggtatttttatttatcctaaaggtacatatgagatgctacactggcagttccttaatgataccctacaaataatcctaagcctttcaagtatattttagtatattaaaagtaagggaacttagtgggggatgttcacttaaatagaataagggttaaatgataacttgacttatcttttaaatgacaaaaaataaagaaattgcaagaccttttcacacattagatatgtattgtcatttatcatctagatatcaggctagcagtgcgaagtaataaaacatatcatcgaaaaatgtgctataggtctgaatcactctttcattccacctcccagctaactgtagtattaaatcaaacaagcagaacatttccttaggcagccattgccttttaatttcctgaagaaccttaaaatatcattcattacaagtactacacatatttggtttttaaaactctcataaatcaatagcaggctgactgtaataattattacaagttagtgcataattttcgtgctgaaggctgcatgcagaactttagcatatgcaaacgaggcaattcaaactgtgtatagatattaatatgaagaagcaggtaacgaggtgcaggctatgaattatgcatcaggagtggctgatcttcaatgaggaaaatgaattcagcatgtaatctaattagtgatggaagtctattacatctaactgcaaaagcaaccgtccttgaaacaaatttatttacagtccatgttaccacttgaaacaactttgaaatgatgtgtaagacaatagcttaattgtaaaaattttttgtttgtttgtttcagttctagacctggaaggcctcctaagaggactcaaagtgtcacctccccagagaactctcacatcatgccgcattctgtccctggtctcatgtctcctgggataattccaccaacaggtaagactgctactcacttatgccaaaaaatattaaaaatcagccaatgtcgtagcttttatatatatctgtggtgacatcgatatttacacacatcaattatattttgtgcacactaagataatgttactgagataatttatttcaaaactgcattatgattaccatcttttctttatttaaaataaaataaaagctgaactgagcacagtgctagaaattattttaattaatcctaccacaaatatcaaacatcaaattattattcctattttcttattaaggaatcaaagttcagagaaaatcagtgactttctcaaggtcactcagctgtagctgtcagtggttattcaaacccaagtctttggattttaaacttgtttagcattccagaaattgatagacatgcatccaaacaaaagacagtaactgtattgaatagaaatgtctcgtaatttttcacaaactaatacgtttctattagaacccatttgaaagatgtttatttctagaattttgaaaatgtataagtaaaagaatagtcttgacttcataagctccataccataaagaaatttcataatgcactggagcaaaattaattcgtttgatttctaccccctgaatgggttcattaattagattatttacataaacatatgtttgcccatctttattgtttcatcaggaaatgagccagatccatgagcaaattgaaatattgctgatattattatataatatagaatatttatattaatgttttttctttatcatatgtctattaaggaaatatacataggaacatataaatgtcatgtattataatacagctgatacaagaaaggtaatcaggcaagatgagagtttttcttttttctctaaattcctgtatcagtattgtatttttctttgtaacatttgtctttctgtgtgctctgatataatcatggattaatcttatttcatatgtcataattgggtggaagtttcttgacatcaatgactgtctctaactcatcttcatttttgcagtaatgtctaaacagttcattcacctttgtggatatttaacaaaaatcattgagtttaatttgtagctatttcggctatttgttcattttatatatttaatatttttttcagcaaggcctcaataattttaattttaattttaatttttgtttttaagacaaagagtctccctctattacctgggctgtaatgcagtcgctcagtcgtggctcactgcagcctggacctcctgagctcaagagatcctcccacctcagccttctgagtagctataactacaggcacaggccaccatgcctggctaatttttgtattttttttctagagatggggtttcttcatgttgccctgtctggtcttgaacacttggactcaagtgacccatctgccttggccttccaaagttcctggattacgggcatgagccaccatacccagccaccaaaggtttttaatagtaaataattgaaaattccatgaaaatatttttatactaatttcatgcatgaaaaattgagatatagaaaaatgaaatcaatagctgaaaactgcccaatttcaaggcaactatcgtcattttactttatttaatcatgtttttcaagtaactgaatcctactgcctgatattctaattccaatttgagatttggaaaaatcaaataggtagtacgttgttaatccttgctcatttatgtttaactgaatgataaagatttctgtttagaaaatttgggacttgggaattacataggaaaatcttttatactacatatgaaaatcttaacttctcttttccgtttttttttttttttttttgagacggagtctcgctctgtcaccaggctggagtgcagtggcgcgatcttggctgccttagcctctggagtaggtgggatcacgggcatgtgccactacgcccgaattttttttgtattttagtagagacggagtttcaccatgttggccaggatggtctcgatctcctgacctcatgatccatccgcctcggcctcccaaagtgctgggattataggcgtgagccactgcgcctggccaacttttcatgttttatagctgaaagactcaagtgtgaaataaaaaagacctcagagtctttgtgacataattaatctctcaatgaaccatgtttctgatgttttttttttaaataaccattttaataatcattttttctgtatttagtaaacttgtgttgactctgaattgttactttctcacagttataagagaaaaaatgtatcctagattgtattcatattataatagggaagatttgtctgcccatatttaatcttttaagatgaagatgatacatagttcattaccaaagtaatgattaaataagatgataccatgaaaatgtaaatagcaacacctcacataattaacaccatcaagtaactttcgggtaagtaagtggagtttctaaataaaggaaggtcatattccaaagtcccaactcaaaatattaaattattttttgaaagaactctttctgaaatgtattatgcacttgccggcttggtgaacagagacaccgaagatactttaaatttggtctttcatttttaaagtacgatcattttctgtatttcaatcactgtgccttctcagacattctacttttgttctttcctatatgttttgaacccagaaaccaggacttctgtcaagctaagcattatatcgaaaaaagaccttaaacagccatgttctaaagaagaatgaggaaatggaggctcattaggagcataaactggattagaaaggggatgttaggctgggcccggggttcaggcctacaatcccagcacttggagagcctgaggcaggaggattgcttgaagctaggagttccagaccagcctgggcaacatagcaaggtttagtctctaccaaaaatcaaaacaatttggctgtgtgtggtggcctgtgcctgtagtcccagctactggggtggttgaggcaggaggatcacttgaacctgggagatccaggtttgtggtgagctatgattgtaccactgcattcaagcctgggcaacagaaagagaccctgtctgaaagaaaaaaaagaaagaaggaaagagagagaaaggaagaaaaaaagaaggaaggaaggaagaagggagggagggagggaggcagggagcgagttagtttagtgccctgtagacctcagcaaactgctttagaacagggtgtgtgagccagctcactactattttgcttactttcaactttcaaacattagtccaaagattttaggttgccagaagtttgactattgcacatgaatggcgttaccttcatatattcagtatgatttctctttttatgtaaaatttttctagatgcagaagtttagattttagggaatacagagtaatgccttcatatactggggaacatatctttactgtcttaaaacattaactggaaatctaatgatcctaaatacattttataattctcaagaagtatataacatctttctcccacaacagtctaccgaatgctttagtgtatttggggaatatgactaaatatgatcatatagacttttaaatttgcaggactttatttatgtacttttgtattctgagaagtaacatttgaaaacgataaaaagatgtaaatatatcttcaaggttgcctaactttgtcctgtgaaaagaaaatggattaatttagacaaatttataaatacctattgatcggctagggggcggtggctgatgcctgtaatctcagcactttgggaggctgagacaggcggatcatgaggtcaagagatctagaccatcctggccaacatggtgaaaccccatctctactaaaaatacaaaaattagctggacatggtggtgggcgcctgtaatcccaagtatttgggatgctgaggcaggagaatcgcttgaactcgggaggcaaagtttgcagtgagccgagatcgcaccactgcactccagcctgacaacagagtgagactctgtctcaaaaacaaaacaaaacaaaaaaccaaacaaacaacacctattgattcagtcctaatcacttttattgtttcttttcaagaattgaacattggagttaaataatagttttccctggatgcatttgttttcttaggaaaaaaaagactttttttaaaaaaaatgtattttcccagtcttaatattaagtatttaggtatctatacttgaaacaaaaacaaaaacaaatacaaaacaaaacaacaaactttgagattgcttgtggaatttttatgtgttattttggctgcttgagtgggcttgtgtgtaaccttagaaggggtgtgggcagatggtgataatttctaaaagttatggttgtcaccggatgccatagcaaccagaagttgaagttaatgaaagaaagaaagttctttgtagagtcacacaaggcaatacctcctgctgtggtcactgcatttattttgactgagcacttgtcataaatcatttttgataataactaccagtttgaaataattcatcctagcaacagacttccaataacattcatactttttataagatgacgtctatttaaaattaagaaaggggttatttaggaattcaaaatactcccctcttgtccaggaatgcaatttggatagtgtatttgccaactttctgatttcatctttaagtcagtatgcaaattaattttgaaatacaattttcataaaaatactaagaattaattgagtcctcagtatttgcctttgacatataaaaattatttagtatcttaaaaatacactcaaattaaatgaatgaatgatttgtagttttgtctgttggatatgtcttttccctcactgtgatcttgtagacatataactaatacgtattcaggtaaagaaagcaattctacacacataccttatgcttaaaaggtaagaatttataacttgcaaatttatcgttttggaaaaaatactggaccggggcaatattaatctagaattaatcccattgaaacattcttatctttaaaaaaatttagagaaaaatgttctcatgtagtgaattcataaacatatttcaaatttaattttctttttttctactaaatagtaaacagcaacaatatctaaacaacctcttttgtaatattagcatttgtaatagtttaaatgcattaaacatttcaacttctcaggagaaaatttacaatgtaaaactgtgcctaggctgggcacgtggctcatgcctgtaatcccagaaatttggggggccgaggcgggtggatcacctgaggtcaggagttcgagaccagcctggccaacatggtgaaaccccatctctactaaaaatacaaaaattagctgggcatggtggcaggtgcctgtaattccagctactcgggaggctgaggcaggagaatcgcctgaactcggaaagaggaggttacagtgagccaagatcacaccattgcactcaagtctggacaagagaacaacactccatctcaacaaaaaaaaaattgtgccttgtatgttgagaagtttattataataaatgctctgtatttcattgggatactcacaagtaaggagaacacaaaaatgcacaagtataaaacagccgcaaattgttggattgtcttcactaataaattaaacataacaatctactgtatgccttacccaaagaataaatctcatatttactatttaaacacttgatgtttatacaatgtttgtattttttttatagtttaatgtattttaatagcaaacttacaggaacagcacagaagacagacaacattaaaaacatgtacttgcatgtagtacaactcagaaaagtatagtgaatggatggaatctactgtatgataaaaatgctacaaacaccatttagttgccgtcaataagaagtttacttgttttaaaaaaatccaaatgctggcattgtccagaaaaatttaacaggtttatttatgattattataaagttgaaccgctgaaacttgttcactgaaacattttaacttgcattaatgctttacgtctccacatttatattaaaaattcacacacaaatgaaaacggaaaaactgccaatacctgatttctgtcccctatttttccactcgcaatcatagacttaggtaccttttgaccccatggaaaaaaaatatctaacgttcagaactaccaataacaggaagaagagaaaaaaaaaaattttttttttgagaatgaaatgtttcccatcatagtggattcttaagcacgttctccacgtatgcggcgtgctagctggatgtcttttggcataattgttacacgtttggcatggatagcacacaggttggtgtcttcaaaaaggccaaccagataggcctcacttgcctcctgcaaagcaccgatagctgcgctctggaagcgcagatctgttttaaagtactgagcaatttctcgcaccagactctggaagggaagtctgcgaatcagaagttcagtggacttctgataacgtctaacttcacggagcgccacagtaccaggcctgttacgatgaggtttcttcacccctccagtagagggcgcactcttgcgagcggcttttgtagccagttacttcctgggtgctttaccaccggtcgatttgcgggcagtctgctttgtacgagccgtggtacagagacctccttacttaccccccttctcttcggctggagctcggcgagcgagaggcggcgctggcgttggagagcgacggcagcgcggtggcggctgcgaacaccgtttgtatgtgttttcatatatttatatatctaggaaatatttgagaggtttgatactagacattttgttgaggatagcacatttaacctataactacttagtacatgttccctttgtacttttcttgaagagaaaaattaaagggtatgtcttcttttttttttcctttttgtaaggcccacctaaactttagacttcatcatgcaatttattagtttcctgtgcctgccgtaacaaattaccacaagcttagtggcaaaaccacaatttatacttgcagagttatggaggttgcgagtccaaaatcagcatcactgggctgaaatcatggtgtcagcagggtaccccctctggaggctctaggggagaatccagtcctttcctctttgagcttctgggagctgcaggcatttcttggttttgtggctgcctggctccaatttctgactctgtggtaatgtcgccttcgtgtgtgtgtgtgtgtgtgtgtgtgtgtgtgtgtgtgtgtgtgtaaaatctccctctgactctcttttaaggacacttgtgattgtatttaggctacattagataatacaggataatctgtcttaagatccttaatataatcacatctacaaataatttttttaaatatataaagtagcattcacacatttcctggattaggacatgggcttaattttggaggccattggcagcctacgacatccagcaagtcactaggctaagtattatgagaagtccaggtggggtatggtagatatgcacacagaagattttggcctattttattcactttggtatcactggtgtgtagaatattgcctggcacagagcagatattcaaactaaatatttgttcaatgaatatggctaataaatgtttagtaaaggatttctgagagaaattattatgccttacaattacaaatttaaacactggtgtgttaatgtagcttctaaaatcccattaagcacagttaggctccagattaaagatgcagcgtgtagagcctaatggaagtatactaagtgtatggaaggcattatttgtttgtttataggttatgatggttacatttaagcataatcatcaattgatggaatttaaatctctaaattgatgctctagagaagtgacatttatagaaataacatagtagcatggaacatattactctttttttattattatactttaagttctggggtacatgtgcagaacgtgccggtttgttacataggtatacacgtgccatggtggtttgctgcacccattaacctgtcatctacattaggtatttctcctaatgcattctctcccccagccccacaccccccaacaggcaccggtgtgtggtgtcccccacccaccccgtgtccatgggaacatattactctttacaattcctgcatatacaggtatatataactacatttgtactatattatataatcctttaagattagaattttcattgtacctccagtatcttgatatataatttaatacatataaataaaatatatttcttaagttaactgaatgtaaatatagctcttgttatgatgaactacagaagaaatatatttacttctttttcctatgtaacatgttaaaacagagtacttctgttaaatcacaatataccctgggtctgttactagcatagatattcataaaaatcatttctttcttatctcttagagcaatgatctattatttttagacttaattaaataaccacatattactagacttctggacagtcctctcatctacttaatttagaagaaaattaccatactttcttccctaatttatttctctcttccaggtttctattgagttctgtagtctcttttcctacactggtctgcactaagaattacaatctgcttatacttctctctcagtagatttcccataatgaagttgctaatgtccttaattgagtaactgcaaggtattatttgcttccttttagtaatatgatgccccctttgacaagagaagtttacttacattaagaaaagcaaatcagattttcagagtcaacttttgattatgacagtggacattgtatagattacctggagctttgtagcttcacagatatccatttatttgtgaaattcttagtgttctaatcccttggttacattgtggatgtgccacatgttgtcttttattgctcgctataattttttaaccagtaggaggtgcagctggtatcttacgtcccttcctaaccaagaaatgcgagaaatacaaatattgtttattttagtgcaaagcaagataaactttttttatttttatttcgtttatttatttattttagcctttccctttgataggctttcctctctgaagctagcctcaaagcttcaactccttcccttaatgatgtgctgtaggttagttattaaagatttaaccataaaatgttggaacttctttttattttttccatactttttggggataagtttcagaactttactctgtcctttgtaaagatgtaaaattgctatgaaagggttggcaggaacaacatttctagagaagctggcaaaagccagaaagatcatagtgtttataaaaaaccttgcagtttgtgtcccaaaacatttattatcctacttattcattaacttaagaactgatttaaacgtattctgcatgtaaaatgatgaagaatttcatttggctctgtaaccatataaatgaacattatggtacaactttggaaagtgctaatataaacctaagcttaatagatagaaatataaagtccagataaatggaaagaacagtactattttgctctacacttcagatggcatctggaatattatgttcagtcatggcaccacaatttttagtaagacattgacaaacttgtgagcattaagagaacagtcatgctgatagcaatttggaaatgatggtgatgtttagtcttaagaaggcttacagataatctgaaagtggatgatacaatagaatcatattgtgcacttctgaggacagaaatctgatagaataaattgcagagaagtctacattggcttccgtaagaaagagccttgctgtgtggagaactgtcagaaagtggaatgtattactaataaaacctcaaattttccttctgacagaaatgttcaagagaaaactgggatgaaaagttgttagccacggtttttctattcaatttatttaataggctatattgtttatgttacaaaacaatacgatttttttgaaaacttattctccctcgctaaccatcagctgtaaattttcccactttagaattactgttgttagttaaatttgaaggcaattttacattgagagggaggtaggttggggaagaccaccttgttcccttctaattatgaaatatgtggattctattttattttacttttaatttttctcccaaacatgacatggtgtctttctagttaaaaggtgcctgttcatatattcattcctacttttttgtatggtaacttaaaattacttttgagatgcatgctttatattcttaagcaatcgtacttgctacactgttttttatggatggaatagttagcttctgaataaaactgtgactatggtaaagctaacggatacttttttttttccaattgaaagagatttttacatatattttttcttttgtcctctctccctttctttcatgagaaaccctaaagggttccatagctgtaaaattagtcaataggaggaaatggcaattattgaatataatataaagaaatatttaaagttgtgatagggtttggaataaggatgaatatgctgtattattttaaacagtaaacatcatcagaaatgataaaacaatgacataaaccctaaagatatttaaatgaaagaccttgaactttacttagaattattttgatttgactttctgatttaaaaagtaaagtcccaagagagaagccaatcgccaaaattcataggaatctttcaggcacatggtttttaaaatatataataattgagccattcaaatttttttgattcttcatttctttcacctgtaaaaataatctttttattacatcaaaattatgcttctctaattgtcatgaatgtcaaatgacacaatttatagtaacatcttgtaagtgatgaagctagacaaaggtaaagtattattgtaattaggctgatcccagtcttattcaatgccattgctaactttctttgctcaaatcaactccattggatttaaaaataaagttaataacttttaaaatgtatagtttaggtataggaagtcttagtttgtcaagctattcatattcacatatactctatagattttgctaatagtattatttcataacactgaaatttggttatgaaatgtttactttttagggacttaatgacactgaactctctttatagacttgtggacaaaataagttttagggatataaaatgtcattgctactgttacaatatatgttcaaactatcacatattgctttcagaaatatgcacattacaaatggtagtagaccttaaaaatggagattgctttcaattgattatggctgtatgctgagctatttaattgttggaaatgaattgacatattgtaaagtaaacaatgaagctgattttcaaaatgataaaactgtaacctaattcaataaattgaatcagattacgcaaacgtttttgcacttcattaaggaattagtcagtataattaatgggagagctttttatcatgttcacgtgttgatatatggctgaagatatatacagtagactaaactatttgaagatcttttgtgccatttcacattaattaaagttgccacagacctaattcctagaaaatgaataccatggactttttttttttttttggctaatttaggatacaatgagtaggtcaggctatgactcttttctttaaaagacatttattgatttttcaaacaaaatggtattgtgagttggctcctaacttagaaactaaaaggtctggcctttattctcttcctcatcgcttgctagctgtgtgacattgagtaacactacctgccctcacttgttcagccattacaggtaggaattggtacctattatgttctagtcaatttaggttttatgatcccagtttattgattatattcctacatcaagctgccttctgaaatacctactttatcatgtaaagaccaccatcataagttctgccttatttcttactcaataggactttgtgaagaacatagtaagcgaatgcagcagtccccaacctttttggcaccagggactggttttgtggaagacattttttccactgatgggggtgggtgggaagtatggttttgggatgattcaagcacattatatttattgtgcactttatttctattattattacattgtaatatataatgaaataatacaactcaccacaccatctgcaggtgatgggagacagtgacagatcatcaggcattagattctcataaggaacatacaacctagatctctcgcatgtgcagttcacaatagggttcctgatcctatgaaactctaatgtcctcactgatctgacaggagatggagctcaggcgctaattcaaacaatggggagtggcttcaaatacagatgaagatttgcttgctcacctgccactcagctcctgctgtgtggcccaggtcctaacaggtcaaggacccatactggtctgtggcctggagtttgggtacccctgagctaatgtgatcacaaaacactttgcaaagtgtgacatagcaagatgccatccgattcagagttttatgatgatgatttttaaaacagataatttgctttgtttcacatggaataccagttatttatctctctatttgaatgtttgaatatatcagttctgggaattatgggttctttcccatatttatggcatcaggttataatcatttcttgtttctttttttgttttttatttgagacagagttttgttcttgttgtacaggctggagtgcagtggtgcgatctcggctcactgcaacctctgcctcctgggttcaagcaattctcctgcctcagcctctggagtagctgggattacaggcgcccatcaccatgcctggctaatttttgtatttttagtagagacagggtttcaccatgttggccaggctggtctcgacctcttgacctgaagcaatctgcctgcctcagcctctcaaagtgttgggattacaggtgtgagccaatgcattgggcccatttctttatttttaaaaaaaaaaattttgttttgtatttttcaattagatcaaataaaatatttttttccctgatacagttctcttatgtcattgatttgtttttgtctattatatatagaattttgtgattcatatttaacttactggaatacatcctacatgactttttgattgaatatcattctattcagataaaacacatttccattagttttcatttcagaaatgcaataattttggagatactatttttctaaagatatatatttttaattatttgagcttacttcctgggatgtaaggatataatttcaggaaagagtgttgagtttttaaggattaaaggggatgtaacactctgtttattccaaagaactatgcaaatgtaagttattattttgggtttaatttacaaatgtgatgctatattatcaagattatctttaaacatgtaaaatgtttaatattaaaggcaataaaatgtttagttcccaaagtaaagcattattccttaaaagtcaagttttggacctattcgttttcctattaaaacatctattttctaaatttgaaaatgtaacattgtgaaagtttttcaaatgtatccctctatttggataccttcatttatctattaaagcagtaaatgccctttgtattatctattatcttatattgcttaataaaattcttttagggaattaaattatggagaaatgtttaagtaggattccatggaaccatgttgattcaaatgaatataaatgcaagtatgtctaaattccaagaaaattaatcccttagtgttacaatataatgatattttgaagttatttgagcatgaaattcatctcatcatacctaacctttaagtaacttattgaataaattaagtttaaggatactattccaaggagaacctgttaccatatgacctgtccatatgagttgtctttttgatttataatggcaattgctttctcggcatggatttcatgacataataatattctatgaatttttgaaattacagtgagttccacatcaatcatctataataaaatactatatgtatcaatgagagagaactattggaatatagacattttagaaatatgtacttcctccaaataccaatgccattattttaatgaaatggggtggtttgcttcctttgattttttaaaattgatcataaaaactgtcagcattatcactcccattagcgtatcatcccatcatctgaacagcaatcttcattttaccttgaatatgttgactgtctgtccagcaaattctgcctagaccacttttgatcttggcctgaattccagagaatctattgcttctggagtttctatgcattaatattttaaatttcaggattataattaaacacatatgtcatggactaccattatctggccatgtttcttttatctgtaagagattcagagagatttaaagtgagatcttagtcatgtaaagaattgactgtgctgctgtttttttctcagtttctctttaaaaaatattgaaaattccttgttataggccttcatgtgtacatattcctattctatatgaaaaaaactgtacataaaatttgacatctgcagctgcttcatttttttgtttttatttttatttatttattattttgagatagagttttgctcttgttgcccaagatggagtgcaatggcatgatctctactcactgcaacctctgccttccagattcaagcaattctcctgcctcccaagtagctgagattacaggcacacaccaccacacccagccgattttttgtatttttagtaaaaacagagcttcaccatgttggccagggtggtctcgaactcctgactcaggtgacccacctgccttggcctcccaaagtgctgggattacaggcgtgagccactgcacctggtcgttttttacttaatatcactttttgctcctaaaatgtcatatcaactagcatgcagggttctttattctctggacatatttttatgtcatcttttcattactgattattacatgttcaactgatttatttttataataaatccaataaaatgcataagtttagcatttcataagtagcatagttggaaacccaattagtatattcaaagagaatattactttttagaaataatttttaaaaggcttattcaaatttataattctcaccgtatgggttagaatagccatggccatattgcagatgcagaccacaataaagaatattttgacaaatgaaaaatatttgaaatttgcttccaaataattgcttgagcttatctacatagtacttctcacatctcttttatagatattcttgcatttataaagcatatttattaagactttgtacataggatataatcaacagaagtaaaaacaacttgtcagttacatttgcatttaattttaaaattccaactacttttatatatacaatcaatatttatgtctatgtatatttttttaccactgcatcttctattgctagcgtagtttctggccaaaatgttgttaaattaaatatgattccattagtaagtataataaattggttaaaacaaaaggcactgcaaacaattcataactaactactacatggtaggaacattgctaatagctaatatatcatttcatttatttctcgtgtcaatttatgaaggaggtgttgtttgtctcatttaacagatgagtattaaggtacacaaaatttaaatagtctgctcaaatggaaatgaagggcccaattggggattgaattcagtgataaataattataaatcttgttttcactatcacttatgctatttccaaggaatccattaatctctttaggtaacattcatattttgatcagaattgaaagaagatgaattgaatttttcattgataaaaaattgttagatgaactttttaaaggacagggtcaaattttaaaagaacacctcagattttcattagcatgcttaatcctaatttcagaaacttcttacagcaccactgcatgtattggacatgtaagttaaattattgcatagtaggcgttttggtcactagtttacaccataatatcttctagatagtgttttatttctctcataatactggtggaaagcttaagaactgttttaaaatagtttcattttgaagatttatatattttatagttacattttaaagtgttgagatgttcagtctcatgattttttggaggtagggtatatgggggtagcaaaatgatagattgagagatcttaaaaattatatttccacattattgaccaagcttaattcattaatattccattatgtttgaattttagttctaacttagctattactttattgagtgtggaaaagtctactaaactttttttttcttttacattgcactttgtttgctaaataatgcagtactaatagactgacaaatgttttatgctattagagttatttctgaacgttataaatagttcaacacattgtagtgttagctgtaagtcccaagcatgctactttaccctaaataattgaaaaaataatttcttaacttttattaataactcactcttatagtcttcatttaccctattgctcattagtagtaaatctctgtgttattatttatttgtgcaattgataaagctcctggtcaaagcaatgtcacaattggcatccaagggaagttcagcataagctctttggctccagaaattatggtcatacttttcatgatactatattagacattaaactgtttgatataattagcaaaagtagttgaagctatttttcaaatattcaatttgtatgttattattacaagattttggaaaatacgaaggcgtcactcataatcctaccatgctgtataaagtatatttcctttgtgtttattaacactgagttcttgctcaaaaatctatggaatatgtaccaaaatatcctatttctttccatttttgaaaatgtggtacaccagttatttataaatatactacagccaactcccatcattttaaagcaaatatggtaaattcacaattctgtcattagtatcattccccccttgcattgcatctataacaattgtgggtccttttatgtttttattgttttcacaccaagatcttattgaacagggaatagagattgtttcaaccatttatggctagtaagcatctcaaattctacatgtatttagttattctgctttatcctgttttccaaaagaacaggttgtttcttaaattcacaaaaagtttagtcttgatagaaaaatgaacctatagcatttttattttgtattgaatctcaaaatccaaatgagagatttgaatattaggaccttgacttgactcacctctgcttaattttgacagttgtcttaaagtgaatttagtgttaaatgaaattttctggactgataactcaagacctgaagggaacaattctagtggtgagaaagtaattttctggcctaattacacctttggcctcactacaaagtctgtcaacaaaaatgccaggtttgatcatgattttttttgacatgtattcaccaatctacttcacactggagattttttttacaatagcattgggtatttgcaacctaactaagattttacatctgggaataaaacctcagtgtactgtttccaacaggtgattcacttaaatctgttttaaatgaaaaattatgtggatattaatgaactttacatattgaactctggaaatctacatggccatattatttgagacagccgtgtgaattatatcaactatcgtcaaatacctggtgaattggttttttaaaacaactgaaaaactggagtctccagaatctctatttcttatttatattcactctgaaactagcagggttagataagctaatagttgggcatctataaaactgggctctttcttaaggagatttgggtccctgtaaggttgattaaccttaaccactaaatattggtggctagtaagcaaatgttggcaattcctttaaatttctgagcgtgagtttctctacatttcagtgctccagtagcacattgtttagctgtcaacccttgaatcttttctccaataatgccttgaccagaaagcatgtatctgttgcatgtttttcacctgaacctaggctctactcctcaaatttgaattgtctgtcttttcaatctagctttttgctttctcctctctttgcatttttttctcttatgttttatttaaaacatttaaaatgacaaagttgtttatgaagcctgtgtttagcagaggctaagttctgatgaaagaatcaaagtaacaaagataactgattgatgttattgaattattgtctctgttgttctgctgtttaactcctccatctacttttgatacattttattctcaattggagaagttacacacacacacacacaatcatatacacaattacacacaccctttatttccaaataagtaaaatattcatagtcattaaatagagtatcttcttgttgcagaaaatctgaagtgaatattagatatcatacaatatattcataactatttcaaaatttatttgtgaaatgcgcactttagaaatgttcctttcataaatattcaacaaatatttatgatgagttgcaaagatgaatgacattgccactcagtaatctataattgaaggtacaaagtagcaataccaagagagttacataacagcactataaattttttcaaagaggaagagaaaactaggggttaaaggcataattattctcattatagtggaaagtgccatttttatattggcttaaaaagagtatgattcaactcaaaacttcatttgtacaacacaaatatgaaaattaaatccgatagcaatattttttgtggaaaaatatatgagtttcatggtattacaaagcatataatgtggctgtttgaagattcaaggcaatcactgactgattaatgaatatgtaatttttagatcattagagtattagtaattgttaccatctattgggatttatcatatttcagttactaagtccttttacatatattagctcatttaatactgataaaatatctgtgggtagttattaccatttccattttacagatgagtaaattttggcactgatttttcttgctcaagactgttaacataactgccaagcctgtttcctgaatcacaaggtgacagtcttgtatgtttatcggcagcattgggatcatttatggttgttatattttgatcgtgatttttaaaaaagcatgtattcatcagtttatttcattctgaacccttttaacaatagtatttgatgttttcaacctaagcaagatttttacatctgggaacaaaacctctgtgtaccgttgccaacatggtgattcactgaagtctattttaaatttgatgctgtgtggctgctgacaaactctacatattgctttgttttggcagcagccttgtttgcttagacgatatcaacagtattgtgtccatttgtggttgttacgtcttgagaggtcatgatagaaaacattgcccaaattgggtaatcacaactggaagttattacattaacattggttgaaggaaatgagaatatttagagaagaatgggggctctgagtagggacattatcactgtctttggatatagttacggaggttacagattaattctccattgttccagaaggcaggactgaacgagtgactgtcactcatgggagaaaaaatggttcaaatatgagcccactgagaaactgtgtggaccatattgcatggaaatctcattagaaatgccttgagtactctctcccaggtgtgttgtacagggatgttttacatttaggataatgttatagttattattaattctaagattcaatctgcctatgaaatagaaataaacttaatttcaagggatctttttttcttgaagattttcatttgatattttattatgggaacatataatctaggaaatgtatcctccttctcaggattatatggaaacaatataatttttgagttaagtgtttgaaatataaaatacacacatttgattatatcatatttagatgtattaatctgtctaatcatatacatagtcatctatattgatagtcttccattaattattccattgtatagaaaatgttgtaatatcccagaacatagtaaatcatgttctttcttttttcctgctactttaatttgtcctttgacagatttaagtgacaaaaaataaaatccttatattttacctaataaaaattaaattgaaaatatctcaggaaattaattttactatgtgctaagatattttctagtgattaagttcatatttactcaagataaaacaatgtaacaaaattaaaattgttcttatgagtcatatatatatatgtatgtgtctgtgtgtgtatgtgtgtttaagcagctagtattactgttattctttgtaataaacaacatggaaaatcttataaagatatttgaaaacttctttttgcttttcccctgtctaggacatgagattgttctataacaatctttttctataacaatgttatagaacaatctcatgtccttttttttattattttcatcactttatccataatactctctaaagagtgttacgtctatcactagatattggacatttgatgtcattttaaacttgtcagtgactaaaaagaaactcattatttcttctataacagctagactgatttctctctttttattagtggtaatttctgttttaaataattacacagactaaagaactgaaggagttaactataattcctaacataatctaacataacaaaaggcagcttacacattacataaaaatattttagagatttatttaaaatcctaacatattttaagaatccatatactatatcatctcccaacaactttctgtggtacatgtagtaccatgagaaattaagactagggtttgctgctgaaaatcagccagataatggcagagaatttgaattcataactccatgcctctgctcgtcccaatatatggggctatggttgtctcataaccccaatacatttgcttactttattcttggtgaaaatagaatgattttgtgttgtattataaccctaaagttattaccaaacatattttaaaattgttaaattgaaaatgggtatacatattttatatgccagatctgaaatattgacatgctgtatgttcaaaacccttgtatataattatgacccttctaacattaagcaggtgactggatttaatataagtcaggcataaagtgccctgcatgtagcaacatagtgaatcaagcaaattatcaaacaggaaagctcattttgtgctcagggcaatttcggctgccagcacttatacatcaaaatttcactcaatgtacaattgattttattttattttgtttatttttaattccctacagcaggctatgttagttttgtacaatgctgtttgcatcattaggttcctaagaaattatagttgtttcagtcatggttgaccaaaatattattctcttcttatagaccatggatattggttcttgaatgggtaccactgaattgaaattgtataatgccagtgactcaaatacacacaacacataacacacagaaaaagcattagtgttgttagaaacatgaacatctaaaaactaatgctgtaaaatcagacagccaatgtccattaaagatattttccacttcaagggaagaggttcaaattaaagtttgaaagtccagtcttaaagcaggaataaattcctgtgtaagatgatacatgtcttcttttcacagttgctttttatgttgccttaaaacatgtcaaaaaaaaagaaaatccccaacagaggagcctaaaaggaatgtcagctctgtggttatgtaaattgaattgagtgctttacagcaggtttaagatttttataactcagaagttgttaacagccagctggtttgtatctgttttttatggttattcttgtcatatgcagcctccacaattcttaattatattttatggtatgtgttttcctcctcctgaatcccttagccactctttgctttacaagatattttccactgggaagggaacaagcacagagatgggacttcatcattggaaatacagtggtataattacttaccactaacagctctacagtgtgaaattcaagtaactttccattgcaaattcataaccttctattagagcattgaaattgctttaatgtaacaatatctgcttgtaaatttgtgagccaccccccagtaagagtcaaaaacatgattatgacactctttgtattccattttttagaagaagtgatatacagaaacttccttccttcctaccttgtttcctctcagtattcattacgtaaattaatttctgtctcatagttaagttctaaatgtgtactttgttttctatttttgattatacaaagaggtagtgacttctagtatggttctaaaaatcttatgttctggttaaaaggcatttcttttagcctcagaggtgtgaataaacttttctgagatttttaacaccctaacttaaaaattgggctaatattcagatttttctcctaagaaaaacagagtgaagaaatatgttctgaatttgaaaaaatgtttttaaaaatcaaaatgtgtgcaattatcaaggaagtatatgtgtgcttatttcacagggacatttttagagacttcaaatctttgaaactatgtacacatttttggtattagttctttgcaaaataaaaatattccagcaagatctcttcctcaaatcacagtttctagtttttggaatacaatgttgtaggttttagacttttaaataatcacattgaaatatattatagctaatatttcctacaaggtgagaatatttaggccaagtgaaggagattaaaataagtaatatgttttggtatacattacatggatatagtgctttttttattacttttttttgagatggagtttcgctcttattgcccaggctggagggcagtggcacgatctcagcttactgcaacctcagcctcccgggttcaagagattttcttgcctcagcctgccaagtacctgggatcacaggctcccacgactatgccagctaatcttttgtatttttagtagagatggggtttcaccatgttggccaggctagtctcaaactcctgaacataggtgatccacccgcctcagcttcccaaagtgctgggattacaggcatgagccacagagcctggccatcaattttgagtataagaaatatataatgcataatgttcaatgaaacaataaatatacatccctaagaatgaatttatataattcagttttattaccttgataggggaaatcaccataattattgtgatatgatattttcaaacattatgccttttagtcacatatcatagatatactgtgtttaagactacagagttatggttcagaaagatttattttgagtcactgaacactttcattttagtgttaaggtatttaatagaagttagtttttcttcttttaaaactggatatcaaagtacattttttattttgtgttgaattatttaagttcgtgagtatacttttgaaagtaaattcagggacacggtggctcacacccgtaatcccagcactccgggaggcaaaggtggaaggattgcttgagctgagttcaagacaagcccgggcaacatagtgagaccccatctctgaaaaaataaaaaataaaaaaatagaattactcagacataaaaaagagaaagtaaattctactcatgaggcatgtttctgtgttaatcattttgagatttggtacattcacaacattttgtactgtgtatgtatatgtgggtctccactagaaagtcaaatgagcaccagacgaaattgtgaaaaagaataaaaagaaaccttttttttttttttttatttgagacagggtctcaatctgtcacccaggctggagtaagaataaaagaataaaaataaactttttttcttcttgagacagggtctcagtctgtcacccagactggagtgcagtggtgtgatcactggctcagtgtggcctcaacctcctgaccttttgggctctagcaatcctcccatctcagcctccctagtagttggaactataggcatatgccaccatgcccagctaatttttaatttttttaatagagataaggtcacactgtgtttaaatgctggaattacagaaatgagccactatacccggcctaggaagcatttttgaatgtcaaccatgtacaatgcaccatactaggagacattttatatactgtaatttattttccgcaagatcctatacagtgcatgcaattagctccattaataaaatgaggactctaagtctcaggttagttagttgacttgatcaataatttataactaagaagcagtggagacagttgtttgatatgtatatgcacacacacacatgtttatgtatatatatgtgtgtgtgtgtatatatatatacacatacctgtacacatatatatgttcatatatatgtgcatatttatatgcgcatatatatatatatatatatatatatatgaaagaagaacagtcaatctgtactcaaggtaaaggagatgagttttcaagtcagtatctgtctatctatatctgtctatcaatctatctgtctatctatctgtctatctatctatacttttcaagtcagaatatatatattctgacttgaaaactcatcttctttcccatggtacagattgactattcaaaaatgtttggagatataacagtgttttgattttgttagagaaagctaatttgtcagcattatagagataggatgacagcctatgcaaaggaactaacataatttaacaaaaatatttaggaagaagaaataaagtagtaaaaatgttggaaagaaaagacaacaagcatggttagagaaggatcaacaaaacgtgctccaattttgggtaagataaatcaaacagagaaaatttagcctagacttagactggtggccataaaatgcagtttagttagctgttttcacagggttaaggagctatatactgacaaatagaagtttgaccagatgccctattcagtaggcagaagaaaaatgttaggccaatgattaaattaaaataaataaataaatagaagctgagagttacttgatctgatactgacagtttggactgaatagaagtataatttgggcatgtggtgaggaagaatgcagaatgaacagggaatgcccaagtaatgacacaggcaagcaaaatcacacttaaggctcatctgaagtagtttaccaatgtaaaacaatggctaaatatcttgtgggactggactgaattaaataaggaaaaaaaagacgcaagaccagtgtgcttctaaataaagcccaatacccaaaatcccaaataacttactttaaaaaacttgctaatgataacctttgaagtatgtcacgcaagtttcaagctcattaaattattggccaattaaaaattactttctactttcttttttatatgcttcataaaaaatgtgactgttccagaatttccctttaataactttttcttctttggcagattaatttagaccatgttgacattttgtaaataaagttttcttgggaatatgaacaaaattaaaacaccaacaaattaaagcaaatgaaaaagaaagatgggaaaaagtgaaatagtattctgatttaggactgcagtatttagaacactgaaggatttaagtgtcatttctaagatttttaattttaatttttattttgtgtgctttcattaagaaagaggcagccaggctcagtggctcacgtctgtaatcccagcacttagggaggcagaggtgggcagatcacctgaggtcgggagttcgagaccagcctgaccaacatggagaaaccctgtctctcctgaaaaatacaaaattagccgggcatggtggcgggcacctgtaatcccagctactcgggaggctgaggcaggagaatcgcttgaacctgggaggcagaggttgcggtgagccgagatccctacattgcactcaagcctagacaaaaagagtaaaactctgtttcaaaaaaaaaaaaaaattaaaaaaaaaaagagacatcaccaatgtcagcctgctatgctttcatgaaggttttgctaagtgatgtcttgatttctgtattcaagtgattgggagaaaatcttacacacagagtaattaacagtaaaaataatgtaataacatggcatagcattatgatatgtgtatcaaatgagtggggcagtcattgagggctgaaaagttctgaagttctaatcatcacagctgtagccatcagggaaggtttcttgcagaaagttgaagaaacaagttgctttcaatgatttcaaatgagcaatctggaaattttctagttttacatcttcagcttttctctgaagttgactaaactatgttagaggttacacatcacaaaaaagttaatgctgccatgtagattagaatcataagtctgtacaacatgcaaagtaagagatgttctttaatgaaagataaacctccaacttttcctttaagcctgcctttcttcattccccacctatctctgtaccaaataaacattttatcatttttttattgttagaattatttttgtttatcaaagccatctgtcatataatcactgtatatgtatttgagatcatttggtgacataatggccaaaatattggcattttaggctttgaagttgagttgaatgtaacgtttgtgaactgtaatgcttatgaaaactcaagtgccaacacatttccatgtactcgcatattacacttggacatgtgggtcagtttttcagtttattgaggcccacttatagtacagtagttaagagtgtaaattttggagttagacacatctggtttgaactgactgccccatttattagttgtattttattttattttattttattttattttattttattttattttattttattttattttactttattttattttattttattttattttattttattttattttattttattttattttattttattttgagacagagtctcactctgtcgcccaggctggagtgtggtggtgcagtctcggctcactgcaacctccatctcctgggttcaagcgattctcctgcctcagcctcccgagttgctgggattacaggtgtgctccgccacacccggcttatttttgtatttttagtaaagaccaggtttcaccgtgttagccaggctggtctcaaactcctaactcaggtgatcttcccgcctcagcctcccaaagtgctggaattataagcatgagctactatgcccggcctattagtcatctaattttagatggttacctatccctttgcacatcattctcctcatttaaaatagtgtatgcttgtgtttatacacacacccatacatactatagatgtagtacaattattaacagaacgctgactatagttttgagcacacagtgcaaatataaatagtggttctattctttctttttttttctgatgagaacatttaagatctactctgtagaaaatgtcaaatatacgtcacagtattgctaagtatagttacagtgattcttttcatattttctggaaagttactgtaatcagttctggcattaaaaaataaagaaaatagaatttagaataaatgatagtgaatacttcagaaatatgcttacttttcattcagtaatctcttgttatctataggtagataaataccaagtttatatataaagggagagattcaaacctaggctttgttttgcatccaaaatattctaatatttttggtacatcaggaaggaaaagcactgtaaggaaaagctttaagaagggaatgctctcctagcaggtgcgataaccacaggtgtcaggtgtaacaattacagtaggtaaaagccttagagacatgcgtagggcagcgtctgcctttgctcttagtctgaaaattcaaagagccttctgagataagaggaaatgacagatcagggagcagcactggagctgaattgactgacggtcatacttcactcaggcttagattgttttgttgttcttttggtagagtttacttttagttctttggtaaatgtgttgaccttagaaccagctgatgtttgttggcactggaatgagtgtttcttcttgtgagtaaatttggaagagtgtgtttcttttgagcatggatttaggggcggggtttattgtgctgctttctccagaagatttgggaaatggggatgaattttgtcatcaaataatagaaattaagttgaactgcattaaatgatcactttgtaggtcaaaattagtcaaatatcagcaatttcatacagtttaaccaaatgtgtgttttagtttaagcttccgaatctggacttgcaatatgtagaaagatgaggtctcatttatctcgagttgggaggactcaaatttggataaattgttggccctttaaatgatcttctttaattatgttctgtactggtcatcgcggtccacttttctacattttctagatttcatttcttgtagtgttgctatttatttattcaaaaagttaacgtttatgctatggagggtacaagagaacaaaaagaaaacttaatgagttatggcctctaccttcaaggagctcatagtataattggacaagctggtaaacacatgataacaatataattcagtatagctatagttgagatatctgcaaaatttagaaggtgaggcggaggaagacataatcaactctgcttcggtgaattaataataactgattatcacttcctaagaggtgataatttgtgatggtgtttaaactatgcatagcagggaggggaacgattcttggcaaagagaacagtgaaggaatcagatgctgagttgaaggatagttcttcggagttttaaatagaatagaaagtggaatgagtgcagtgactggtcagtgatatatgtggaaaggtaggtgagggacaggttatgaaagcctaagcattgctatagataaggtgtttgaatcttgagttctaggcaatgggtaatgccaaaaatgtgcaagcagaggagtggaatgacttaattttgtgaagcagaaaaagaaagacaatctgccatggggagagggaagataaagggacagtaacgatttgttagagtgctgaaatctatactagaatttagccttgttttctaatcatttagatgatgaggaggcagcctcactgttccattcgtgtggcttggtgcattgctagttctaaagaccgatcagtgatctcttatgtaatctttataagcatttgcatttattaggtacctatgtcatatgaaacaaataggaatacgatctagcatgacaaatgccaattaagtagttcctcaggaattcagagaaacactcatgaagggttcattaatttactaaaagtctagtatttagcaagaatatctctaggagctggaataaagtattgagtaagacatgctgtctgtgtcacaaacatacattatagatataatctttctgaacacatgaatatctgtatatatgtgtatgtgtgtgagatactagtacaaatacagcttgcagtttcctaaaatttattccaaatagtttcataatatattcagaagcttatgatgcatacatttcatgtatatgcacacatatatatacacacatatacatatacatatacatatacatatacatatacatatacagatacagatacagatacagatacatatacatgcattcttatctcactcccagagtgccatggcactatcacagctcactgcagccttgacttcctggcctcaagtgattctcccacctcagtatcccaagtagctgggactacaggcgtgtgccaccacaccaggctaatttttgtgtttttagtaaagacaggattttgccatgttgtccagactgatcttgaacccccagagttagaacccactcataaactttttattttgttttctttttctcttttcttttctttctttctttcttttttttttttgtgagacagggtctcactctgttgcccaggctggagtgcagtggtgcaaaacacagctcactgcaaccttgatccccagggctcaagcaatccactgacctcaggctcccaaagtgctgggattacaggcaggagccaccgtgccctgccctcatgcacttttgaaagacctatgacaatagttccatgatgatatcaacaaatatttgagcagccatgttttcactatattttgcatttttcttctgtgctatagcaattgtatgtcttttagtacaatgattaccaaaactgtattttgctcttagaataaatgctaaatagcttatataacagtaagttcaaatgacctttgcaaatttttactaacaataaaaagtaataagatgcttaagtatttgatggcaaattttacttcatgcataatgaattacttttcataactgaatgtcaagactggttttgtttgtatttatcttacaagtggagcttcaaacttgaattaaaataatttgtcataaaaattattaacatcaagtaattcttacaaatttattatgatgaagatgcactgtcaattttagtgattatgtgaataaatgtatgtgttgaaagatcatatgtagttgtcaacttttatccgaatgccttgatgataattagaattcgggaaaatagagtttagagtctcttagaattctacaaatccctgattttctgttttaaaagttgttttggtcttctattacctcacagagagagaaagtgtttcttgtatagaactgcttaaatgggtctatttaccacatactctgaaaatctaaatatcttattatctattacaataatattatttaatttgaatcacagtttgaagttaaaaattaaatattttaacttttattcagtaaattatatttatggatatgtaattgaatgttgacattgagagtaaacagtgtaaggaaatggaaaacaaattatatttttctgagaatagaaatacttcttgctgctgtaatataccaagtactgcttatgtactggattacttgactattagaaattgtctgtgtaacaaaactagccattgaccaagaaaccaatgtaatggtagaggaaacattgctgatgtgctcttgatatgtattgattgatttgttcttagagaatatgggggaaatacacatgatattattagttatttgaatctccttttatctattctccactattcttggctatttcaatgtgaacaaacagtaaatatattataaggagtgagcatatttaggggctccaatatgcgtttaaagagactttgtgtgtatcatggggtagcttttaataaaggtcaaagtgcttggccttccaggggaaagacgaggattctagcttgcttctggcctctgctcataatgtgagtctgagattaaagaatttgaattccaagatagcaccaattcttatgtctgcactggataatttagtgactatatattcaaagtctaaacttagaatttttgtgagatccgtgttgctcgtatccatttaactggatctctttttcagtgtgattttaccatgatatatttctagtaataaaatgtccttaaagtcaagatgtgtatagtgaaaataggtaatgtaatgacaatgtggatctttttgtgatttttgcaatatttgtttattttcctttccattacaacatgaattaaaatttagttttcatcatcttaaaattagtttctatatggtgtttgttatggaaattagtgtcttttgatgtcaaaggacactaacaatagcctacatatatggattgcttatgttctaccttacacagttgaagttcattatgtgtactccctcatttaatttttatatccgctacaacatgttgttgttgtcagccccatttacagggcagttaagtgacttttctaaggtcccttagtaagctgtagatccaaattttacacaattttaaaatgtggtacagagttcatccattcatgtacattcatgtctcccttaatgacgaagatacattctgagaaatgtgtttttaggtgatttcatcttgtgtgtgcatcgttgagcgtacttacacaaacctaggtggtatagcttactacatacctaggctatacgtatggcttattgcttctaggttacaaacctatacagcacattactgaactagtgtgaggaaataataatacaatggtatttgtgtaataaggatttttcagcaatattacaatcttatgggaccactgttgtatatgtggtctgttgttgataggaacatcattatgcagtgcatgactatacttacaaaacaaaatttctggcaaggaacatatttacctagcaagttccattattgatcctgagaaataaagttgaaggggtggatttatgttattattgccatggccttgaccctaccatctgtcctgaacaagtagtggcatctccttcagtagtgaggcttctaacgcataaatggcaggaaaggggtggctatggtgagattataggaaggaaactgtcatcattgaacacctctataccataccttttatgcgtcctatggcatctaatgttctcatcaattctatgagacctaagcaatgtgatcctgatttttaatgctgcaaaatagttaactgtggtaaaaacagttgagatcttacaaacagaagccatctatctaacgactgagaggggattggaacacagctcttagtcttcaaaacccatattctttgtcctataccatatgcctgctattgctcacaatttttaaacttttaattaattatttttttcctgttaatggtatcaaagatggacattaagaggagaaaatggcactaacttggccataaacacatgtactcttaaagctattgttgtctccctccctttcaccctagtcccctctttctctcttctcgtcgcctctcttgagctctgcagttgctgtatcatgtttttctaaactggtctgcaccattaagaatgaagaacatgaggttaatgattctagtactgtatcaaagcattgagaaaatgttaccaccaattttaaccaccccactgttactggaaaagtttgagtgtctatttgatatagctcaaagatgaccagttttttggtgtccacattttattgtcatatatttgattgtatagtaattaaatgaaggatgccatctttgtgttctgtagacatatcatcttattgtttatatctctccagctagagacaagaaaggaaactcaaagcaattgggtgctatttcatgtttctgttcctggtaactctaaatataaaaatcaaattcactgtgtaattttatgaaacttttctgtacaaggaccaagactttcattatgagaataaagtagtgtcttgaaaacaacaatgatattatcctctgaaactaggagttgcaggttaactgttgagcatgcttgggaaagattacaaatattggaatattggaaatagcaaagtaagtgggcttctttttgaagttggtagctattttctttaatattctccaaggagcttttctcacaggcttttttagttgctccacaataacaacccatcaccccttcttttctaacagaatcctaacttgattcaggtattcccattgtttctccagtcatgcacttaggaggtctcagccccatgttctatcccagttgtgagtcatggtggccctgttctctttgcctatgattggttgggcatgatcagatgatacagtttgaccagttagagccttttagatgtcccgtgggaacgatttcttcaaggactaaaaagaaacatatagcataatcagctaattcttttttagttggattcctggaattgctgtagctaactttttaatactttttaatatgagggttatctaccaacagatagcagaaaggaaatatggaaaaaaaattgggttctagacatcattgatttcctgatttatctaactgtaattgtgctcgtgaaaactctttgtacaaggactggtatgttttcaaactaatgtctttattatttaatttgaggatttttcttacttgctgtctagttcccttccagcttcacagctcatgctttacaaggtaatgataaaatatgccaagacttcacatttgtggcagtgttcagaatctcagttgtcatccaagtatcatttttattaacagttataaagtgatttgatagtgtcaaatgacagatgctaagtaaaaatcattttcgttatttaaatattataagtctgttgtctaaatgtatgatcacagtttgcctatagcctcaggtatacataatgctacccatgcctttctcttttctctattcatccatttttgcttagcaatttttacaagacacctgagtattggtaaatagtaatggcacacattctttgccttttgaaattcagcagaatccacaattaaatggatattttattgcaattgtctttcagagtttaatcagagtgtatttattgctgcaaatgcagacttataaataattccacactcactaaaatgctcaaatatggcattcttatcattatcacaaattgaggtaccttgaataaaacaaaataagtacggaggattttctattttccactaaatggtatataagaattactttttagatatatttagtgtgtttttgaacaaattgaagtttttcatgtgattaaacttgatcaaatagatggatcaactttctctgtaacaatgagtaaacttgtagatagtgttcacatttttatgtccaaatgtagaaagttgggctaatggatcacttctgaaattcttcatgtttttatgacatgtattagactctgcaattatcaacactactttttccttattagtaacttttgagtggctgaagaaaacaatttgctttgactgtatcactgtttaaaagaaaaacgattacagaagggttgttttttttttcttttttttttttgagacggagttttgctctggttgcccaggctggagtgcaatggcgcagtctcggctcactgcaagctctgcctcccgggttcaagtgattctcctgcctcagcctcccgagtagctgggattacaggcacccgccaccatgcctggctaatttttgtatttttactagagatgggacttttaccatgttggccaggctggtcttgaactcctgaccttgtgatctgccttccttggcctcccaaagtgctgggattacaggcatgagccaccgcacctggccgattgcagaagttttatatctcttttggtcctgttaaacaggaaagagtatattccagtctcaaaggcaatttcttgaaggacttttcaagacagagttcagtatctcagtttgtttccaaacttgaaatttctcaagtttcagaaacacagacttattaggccaccaggctagtgcagcaatgtttagatatttcaatcaaagaactgtgttctattaccctaggatctatgtcaagctgtggattaggttaaaaaaccaacaaaagctcctggtggttgaaagattctaagtatttgctacattactgcattgcaggcatgagcacgttctttcagcgttttagtttcacaatgttacaattaattaattgtgtctgtctagcaaaaacactagtcggagttactgtctgcacttttaataaatcctttgaattcccttgatctttccttattcttatcctccctgtgtactgtagcacaactttcccaagcccataaaaatctgattaatggaacaaagaattagacttgagatacctgcttttgttactctcccatgcttctctgaccttgagatcaccttctaaatgtacctcaggctttttctcttaaagaagagtaaatgagatgattgaaattataaaccatgaccactcttgctattactaaatcgtttacgcacatacatgcaacttgtcattcacttatgtacattctaaactacagtgtttcgttctagaaagtagttgatatttctgcatttttcttcacctttttcttcttaagctccccagttatatgcctatgtcaaaattatgcagtaaataaagaggggggagaatcatgtttatcaattgctcttccgacaatgcttcccctcctaaacttggagtagcactttatggtttcttgcgtaaaatcaaacctgctcgttgattctaaaaccctctactaatttaatgaaaaccaattattccaacttgctttggattctggtatctaggcttaaccacatttttcgaaacaccgtgtttgtatccttaatattctatgaataaaacttgattttttttttccattcatgattcaggttagatggtctcttctcagaagtctcctttactattcttggcaaatacagaaaagaaacagagctgctgctataaacctgctccatccttgaccccagaagaactcattgccttccagctgtgcagagtgcacttcttagtagggagcctggtcttgctttcacctggtgctgctggtgtaagcagccatcatgttcagattcaaaggtggccaagatagcatcctggggacatgtccctggaatgaagtagagccccagttctgtccaaatgctgctaggtggaatagggttgggtgccctgctgagagcattgtgatttgtggatagaacctggcagagagggccccgttagtacagagccagctctctttccccttttcttgcggaagatctgaggtatgatgcaaaacattgcttcttccttgtctcacagtttatatgaactctgttggtgacaggaggatctaccttatttatactgtggcgtggaagtggaattgaggctgtgacaactttcatcctcaacacagtgccagctgaaaaagtggatgtagttgagaagaactcagttcgtttacttctctagaaaatactgatataaaaactacacatagaccattcatttttggttgagaatattagctaagaagataaaagtgttcctttcaaaaattttaattgtatatcaattaattattttgctactagcatttctgatgacagaggaaggatttctgcgttaaaacaggtcagataatacatagatactgttttatttacaatgcatttaattaatatcaaaactacagttgactttgtgcaataatgacaagattataaggcattatgttgtgctaagcaggagactacaatttaagagttagtcttttcgggaagaaaacatgtccccctcctcccttttgtagttttacgttgagctagagagattgttttctaagattcaacacctaaagaaagcatttttttaatattgttcaaagctgacctctgcttttagaaaagtttatctgcactttttcatctgtttagaaacatatatttttggttaagagatcgaagacaatctctctttgtcttttttttttcttctttccctgagctaggaaggttgagataaaaaagaatgactgctttaaaagtcacacatggctgtaatttaatatttttttcctctcattgtccgtaacagttgaaagaaaccttcaatgaaagtttattaactaggccaatgcctgaggcaataaaggttcatttattaccagtttcttggctgtttttcttcttctatttttcggttaaactcatagcgtaagataatacttcacaaaattaaacctttgaccttctgtagagttaagtctcctttgattagataaagtaacaatttatggtccagcatgaggttgcacatgaaatgaataatgcaacagactccgtgtggactgagaatctattgcttttgaaaagatgaatgctgtttaaaggggagaaagtccgcttaagtgtgttgtctttattcagtatgcactttagcaatatttcaaaaggctttacctccaagataaagttatgtttgaattttctaattctcataagaaagatgtatggtaagagtattgcaaaaagcttttgaaactctttgtaggactgtcatacatgtcattatgccacatattccaggtattacaaatggctgaattatgaaatctaataaatgcatgagaaaaatgaccattgattttacaaatggagttccaaaggatgggacaattagaatattgtaatttctaatcacattatgtgccactgtgaacattgcataaatcaaaatgatatttaataacttcatcttaagaagaaaagtaacaataataaaatataataatattaaactgaatttgtaatttttttttttgagatggagtctcactctgtctcccaggctggagtgcagtggcgcgatctctgctcactgcaacctctgcctcccaggttcatgccattctcctttctcagcctcccgagtagctgggattacaggcacgtgccactatgtctggctaatttttgtatatttttttcagtagagatgggtttcactgtgttggccaggctggtctcgaactcctgacctcaagtgatctgctcgcctcggcctcccaaagcgctgggattacagccatgagccactgcgcccggcctgagttagtaatttttaaaccaatccatgggagttcagtctttggttattgtgatgtattaatgtttgtagataacagcagtgttttcaattttgttttgtttaagtcaccttataaatttgaactgtcataactcattgacaaaaaagagtgactagatgtgaaatgttcagatatttctatttttctatgttcttttgaacattttttggaaaagttaaaaagaatctcaaatccatccatgaaaacattgtattggaattacctaattgctacagaagagatatacgtacttgtagaatcagaattgatgtttacttgtatcttcagccagtggaagtagagagatgtatacatagcataggtcggtgtttctcacgaagcttttgtgattagctggttatttaaattactaattgacatgcagaagttgaatgcttgagagaagtgtcttagttttagtttggttctttttcaattagcttaaattatttaaggtgaataaatctactgcagtgatttagtttcttttaatagaatctcatggtacggtataaattaggtcaagagaagtcattggatcagtataactacagacattgcgtctaaaatgaagagatgttaggaaaattgaagatttgctatgacttacaaatgttttgaaacaaagtaaaagttcctgtcagaatacacaaaaggttcacatttcttggcatgttagtaactaaacatttctttctgttggaataatttttttgcagcaaaaagagaagtgaataatataatactgcacattggtaattcttcctgatatataattgctctgttcctaggtgagatgggttgaatataataatcaaaccttataaaagaaataaattcaaacctaaacaccatttattttttgaacagtaaggtgtgaagtctccttataatcagactaagtaatttgtctaagtcacactcaaagaattaagtaacttgaccatgattatgaaattgtgccaagataagggcttcattccctttaacattccaccatgtaggagatgccaaccatttgagactatggaccacaactcatatttcatttgaatcttccttatcacatggcactatgtgtttttctagattaactaggattgtttttttccataatccaactttaaaactgcaaacacaaacctacttttcaaagcactacaactggcctctcactattcacgttttctttgtaaccagatgaggaaaacacttaccttgtaggttgatgatggagcttaaatgagatgttgttataaatgctagacctaatgacaaagaagtaaaaaatataatgcctcaaccactggtttctctgttcctattgttaaccagtgactctgcatgtatattgttcctagcccactcagactttgacctccacttagaaagaatactgtgtgtctgtattctttattctatgtgtgtgtatatatatgtatgtgtacatatattcatacatatgtatgtatatatgaataaatttcttgcatgagtcttttccttgaaaaacatttatttactgtatcagaagacttttgtggccacgtattttccagctatttttatttaattagatggctcatcccaaacaagacttacatgtaaaaatagccacctcttttgtttttttttgtcattttctgtcctcaacaataaactacacatgcacagaccccatgtggtacttggaatctggaaaaagaaaaaaacaactgagacattgaggtagaaatggatttagacaaggatttgcatgatattgagaaaagtagaacatttgaggagattatacttagactgaaatgccagtgaggttattcttttgcaggaaattacgattatcgtatcttttcctcttttcacttattatattgcctgaactatcaccaatacattaacaagaagcctcttaacaaaacaaaaacatcgtttagagtatcacacactttcaatcactctcatgctacttagagctacctgcgtggagtcaattcactgagtaattttggctgatgggttctgtgagtagtaagaagtattgggccttagaccaacatgaagatatctaatgcctagtttattaaataattgaaaaagatataatgagaggggtgcttaaaagaaaattagagtcaaggcatgtcagttcaatttgtttctggttggaatttgttttatattcaagatatgcagagaagaataatttatttactcttctttttatttcttcctcattgtgccctatgtaatacataggattcaggcacaaattatattgtatttcaccaatacagtataggttaaaagttttgtgcataaagttcaatggtcattgtttctgtggcagatacactctaaattctataaaactgaaacacaaacatttagatcagatttctaagtggagtcaatttatattggtatatttgtgacatacctgagtgtctataacttcgactttctatacaatccataagctactagagcaaagtgggggtcatctgtttcaaagactccatagtttactgtcttctgtacttttctttttatatttactcatagaatccgtgtggtcagtgctgaactgggagtaaggcgaattgggattactctgtgattatttaatggtgtgactttacagaaatgattaacctcattgcccctaaatttaatcatcagtaaaataaaagggttacattaggtaaagtctttctaatccccaagttttataagtttaagaccccaagaggttgtttagaaatatttttctaaaggtagtaatgttaaaggtggagtaaaagttacatatttaagacctcatagtgccaagttcaactttttataaattaggtaacagttgattttaaaccaaattatagtaatttaaaagtttttattgattacgtttcagcctgattttgggttagtgatcagaaggtgagcttttcaaaagctttcatagaagttcctcagtgattgatatggccagatgacttccctatggtgttccttctttctgatttcacttctataacctcttcagtctgagaaattgagattttaagctatccagaaaaagaatgctaaatctgatgtctatttgatttataagtcattattcatattataacaacatctttcttactgtatatatctccaaattagtggggtttttttgttgttgttagtacaaacatttaaaaaatctaattcaatcagttgaaagactcaaaactggtatagggagtgtttccattaatggcctcaaggatcaatttttctttttctctgcagaatacaaatgtgtttcaaaggccaagaaaagtcagtctaatggacattaagagaaaagttcacactcaaaatcttcagtctaaccagatttacaattaagttttttgttctatctgcttatcattctggttatttaatcattcaagagtgaagacatgcatgtttcaatcacaattttaatttatttagaaagcattgagaaataaaataactgaaagttagtgtcagtttctgacagctggtatttaaataaggataggaggaaaacagggtgaaaaaaggtactggtgttttcaaattgttatattgagccaagagttcttctaagacttggagtgatttcaattgagttgtaattcaaactcatgtggagcttacaatgcaccttcaacagagttttgcaaagagtctataggaactgtcaggagcagaaagattacttcacagtaatgactgttgaattgaactatgctttttgatgttttactttctgaattgaattgttggacaagattaattgcacacggtgagagttttaaatgaatgactatgtaaggcattaagtttctctgtatgccacttggggaaaaatagctgaaaggtttaaatgaataagtgtatttaatgcacaaaatgcctgagctaattttaaaattcttttgctaacatccttattgaaaatagaaacccactttattcatctgtcttggttatattgctctggttgaagtaatttaatattcctgctttccactaatcttctagttcaacagaagtaaacaataggtttcataaattaaaaatacactcttctgaacatgcttataagattaaaaaaacaaggctgtaaacatttatgactgaaacaaactagattgttcaaatactgccatgatgtatcatgtatatgaatatggcactgatatcagttagaatgcaaacaaggttttaaatgatgtgccccttcatttcagctggagaatccgcttcacaccatctgcctatcagatggttaggaaccaggactgcgtattaatgccacatgttcgattttcctccttcttgtaatggttagattcatattgctaatagctgtgcatgagcactgtcgacgaaatttctgtgacggtggagtgatgagatatttataagccgcctgtctctctgaataatcagtaggaagaatgccagacataaataacttatcaattccaaaataataactaccattggctataatctactgcatgtttaaaatggttttgtttaaatgtaagcaaactaacacaaactaataacaagtctatcatatggaaagtttgaatacgtaacatctcttggatataacccattttatttaactattaaatttgaggaaatgcattttatatggaatgcaatgtaaaagtagacaatatatcaaacatttggaagtcatcttgatgtctttgaaaccaaagatcaaagattgggcctttcaagttaatgagcaaacaaacagatcagagaaagaatttgacagcaatatgtctcttttattgatatctataatctacaattgtaatcttctatttataagtaagggtactaacttatttgaaataaataaaatggagatagttttccatttttttaaagagagtaatcaggattgtataatggcatttgaagaatttaaaggccgttttaataaaggttgaaagcagaagaaaaacactatctttaaaaagtgaaagaatattctaactagtaaaaatgcctgcatctcttccaaaagatatatccatggattggttttagaatatagaatttaaactagtgaaggctttgtcttaatacagcatggagtgaagatttagtgattttatgataaatctgatcaatgtagagagccaaatccaatgatttgatggaaacctgatttttagatatccgtttgccaaatggctacattctcaccctatgctgttaggtactttttgtcctatttgcacctttgtaattgaacaaaggtaaaactaaacatagagacatgatggatcgtatgagttacttcacagtttcagtgagcatttatggagggggagggcttgatgtgtgcccaggctgttgcacgttatttcaccttcattcttcacaacacacctgtgaggtcagaattgttatccctctgtttagagatgaaaattttgaagcatgggacattatataactcgctgcgccatcccagataagttagatgcatcttgtccaaagtttgcatggctctttggggtgtctctctccccccagccactgtattatacatatttcttataagagagtgagtctagactacaaataacttctatgctggtcagtaatttagcaggaatcttaaaatactttagtggaatatcaaaaagtgagaataaaagtaaaagaaattgactagcaaaggtaaaaatttttaacaatagcccatttttaaaaaaaatctataatttactctgaagaagcaagcataagtttgcatcataattcagatagtaatatgacaagccacgtttctaagttctgtgtaaaaatttgctcattcttttaaatttgcaagtgatagtttgtcaagattcaataggaaagaaaaagaaatctaaatacattgcaccacttaaggcaggtagtgtattaacccaagtttgatatacagttcttttcctgaagaccaattggaggcctagaagagagaacacaatatatgacttattatctttccactgaaggaaaactttttttttttaaagaaacctttctcaatccatttttacgcagtgaaaaattattattattattattattattattattatttttactttgtgttgttttgttctgttagaaaagatttttaaagtcatcgtttcttgtttggaaactgatgaaggaattataaagcatctctagctaatcaaagtagtttaacttgtgctcacaggattcactgcctaggatctcaacctcctaaaaacatctggaaaatgaactttaaatatgcattaaagtttctccatttctgatgataaaattagatttagaatcttttaaaataaaatttagacttcctttgacttctcagttcagtacatttttgtcttggtgtaggagatacttttatgcaatgtgtttttatgcaaaaccacagattccttagtccatttcagaaatattctgtggatgtgggcttggagaacatcacttctgtctttatcatgcactgcagctgattgcctagttctgagggagaaatgggttgcttgaatgaaaaaatgtaaaagcagggtgggcgcagtggctcatgcctgtaatccctgcactttgggaagctgagacgggtggatcaccagagatcaggagttcgagaccagcctatccaacatggtgaaaccccatctctactaaaaataccccaaaaattagccagacctggtggtgtttgcctataatcccagctactcgggaggctgaggcaggagaattgcttgaacccggaaggtggaggttgcagtgagacgagatcccactactgcactccagcctgggtgacagagtgagactctctcaaaaaagaaaagaaaagaaaaatgtaaaagcagtggtaatttgtagtataagacaattcaaagtgggatatggaagaggggggagggtagcaaaaatttccctgaatctgaagacaggggagaagatctatgataagtgaagaaaggaaggaaaagggtgtggcaaatgttatgggttgccagtgtttacaccagtggacaattcttgattaaatagaaatgttgttatagtttatattctctatttagtatagaccaaagacttaagttattttgtgaatttattacatgaatttttttgttgttgtttttaaggcaactttgtttgggaacaacatatacaatgagacctctatttaaggctactgtatagattgtaagctatgtttttagagacaggaaattggaagggatttgagaattacatcagggatttgaaaggaccattgcaaggccaacaggaagttcaataaatgcagagtgggttgagggtggtgaatcttttgtgatcctctccagccctaggcaagacatacctttggagagtcatgctttatattaagttaatgagatttgttattcttagtctatacacacttaatgtaacataacaataatgttttaaattactttccattgacattgccaaaataatgaccatgtttctcctgtggctttccatgtaatctaatttgataaggatttgttcattcagtgacaatatgtgccaagcaccgcagcagatgtttgggatatatatacgaagaaagtatttctgcccttttagtgctatgacctagttagaggtcagaatcctaatcctactctccttggccccagcccccagaaaagagcaataaagagtttaagagactgtttttctctactggaattgcttattaaaatgacctgtagaatagtaagattaaccagatatatacagttgcagaggcctcaaaccagacctgatgattcagaatctcagatgctagggctgagctatttgcatagtttaaaactccatgggtgactctgatgcacagctagggatggcagactcacatacagcagggttgatgcaaacacaagcaagtggggtagattggggaaggtcaggtacagctctttaaaagagtaagccatgagctaattcttgagatgttgagagctctttcctaggtagatagttaagagtcaggaacctgagcctccagctctgagcgcataatatttaagtgatgacatgaagaaggcataggcaagtccggggccaggacatagagggcttttctggaaagtgagaacagaatatgcaaagactgacttaaaagaaggaatgaagtcgtttgctagtgaaaaggaaagaaggcctatgtacctggagcacagagagcaagggggagccggaggagcaggaatacatacagataggcagggaactgagaacaaagggcgctgacagccatgagaagcactggactggatcctaagagcaagcattgaatatatattcaaatcctcactttcaggccaggtgccgtggctcatgcctgtaatcccagctcttcaggaagccaaggcaggtggatcacttgaggttaggaattcgagaccagcctggccaacatggtgaaaccccgtctctacaaaaaatacaaaaatgagctaggcatggtggtgggtgcatgtaatcccagctactcgggaggctgagacagaagaagagcttgaaccctggaggcggaggttggagtgagcagagatcacgccattgcactccagcctgggtgacagaaggagactctgtctcaaaagaaaaaaaaaaaaaaggaagaaaaaagaaaaaatcttcgctttcatgaggtttggctgactatgacatggatagtaagagattggagatgggggacgtgctattatattgagcaggactctaagaaagaaaagatgggaacttgtactggtggggaggggcagtgggaatggagaaaattagttgaattggaaagatattaaataattagaattgagaacccatcaaacagccaggtgagttagtgaaactaaaatcagcaattgttgcatatgtcatagcttgctttctgctttcataaaactgggctaaaagtagaatattaaaaagtgttgtagttaagttacagcatgtaaaagtgtatgagtgtgtgtgtgtgtgtgtgtcagtgacacacatatatcttttggactttgtattagaaatgtaaaactgggaaaagctgtcatagaaaaataaaggagtactataaataaatcagctaaataataaaatcataaagaatatttttaaaagtcaggggctaatccagtcacctaaggacaaatgtgattattctagctgagagggctgtgtcaggccacagatactctgcagaaattatagtgaggccaagcctttctttttaacaaactagaatgaatagcatgcctaatgtttactaaacatgatgtggcattcctcacatagtttattttatttatccttatattttttcttggggattagaatggttttacaggtgaaaaaattatattcaagataattggatggttggtccaaggccatatcatgcatagtcatggttcctggtacttaatttgatttggatctctctgataatagtgagttgtaagtttacctttattatttgaatactgtgaacaagttttccctgcagcacaaatccaagacaaagacttttgaagtcataaattggagatgggtcaacatcaggtaaccaaggaaaaatgggatgttcacattggtgacaaaacaaaattgaggaagaaagatttgctggaaaacacaaagagacttttaagagaacaggaaagaaaattttctgaaacatctttgaaggaaatgagtaattggggagaaaattcaatcataggaagatgagagaatcagttcaagttgagacttaaaaggcaatgaatgttcagatcaaacccagatggattctttgagtttagattagtgccttttaaggggtgattatcagtttttcatgtaaagacccaatctgaaggtcttgttgcgttggggtgaaagttgtcagggcctctttggtctgatctgaaggaaaggtgaagtcttcttctaacctctaaaaagccagcagagattttcatggaaaaatacttccttataattccttgggcagtaacttatttgctagaataactagaagtgatgattagtggggaggaaaaggaggagagcggtgctcaggctctaatccaccagctgggattggaaataaatcacacagataaattcgaacggctggagcactgtagtcaaaaatactaaagaagccacagtaaaaaaaaaaaaaaaaaaaatgggtggggttggggatatttatcttctcatagacttaaggttttagaattaggagagatcatttatacattccagtgtctgtcattttgcagatgagggatgtcagcctgaagtgaactgacttggcaaaagttcacacatttaagcaagacaaaccactcccctgctcaaaaacctctgcttattatctctctatataaatatataaagtcagaacagcatggtcttaattctgatcttccgagatcttgtctcaaactctgtttcttttctttttttttgtctttttcttttctttccttttcttttctcttcctttcttttctttttttgggacagagtctcactctgtcacccaagtgtgctcacagcttactgcagcctcaacctcctaggctcaactgattctcctacctcagcctcctgagtagcagaactacaggcacaggccagcatgcccagctactttttgtattttttgtagagagggggttttatcctgttgcccaggcttgtctcaaactcctgggctcaagggatccgcctgtctctgcctcccaaagtgctgggattataggcatgtgctactgcacccggctcaaactctatttctaatttaatgtctgcctctaccccctgttctctggatggatgaagatgaactattctggacaaattttctttgcatagtggttcaaagtgtcaactccgaggccagagtgtgctgtttcaaatcctgtgccatggttttctaatctgtaaagtaaggataatagtgatcaatcacagagggttattaagatgattaagctacttttatgtcacttaaatcagcacttaaatttcataactagaagctaagtgttagctttcattacattgtattttattttttaacaccttaaacactgggaatagcaagctgtgtagcaacacatgcttcctgccattgagtagttcacaatctagtgaggaaaacaggtgtcccaacagaccattccagtgcagggtggcatgtcctataacagcagcacaggtataaacgtgggtcagggggagaagaacagaccaggcatccaggcagctgggggccatggaatgggaagacttctaatgagtagcttttttcaggaggatgaaaagtcaaggaaatgtttgtcatagggcaagaaggttccaggcaaaagggaatggcatgtgtgaaagcacatgcttgaagatgcaggtcatgtatgggtaatggtgacatctgtgatatagccagggtgtggatgacaatgaagaaactgggtgaggaagtaggtttacactccttgtgaaaggccttgtggattcagttaacagttcagatttttccctccgtgtaggcagctacaggggattttaagcaggaaaagacatatttagattcgtagattggtttctttaagagataactgtcgctgcatttccactattagccttctacctgtgaattgtgtttctgttaatatttaattttggactgtagcaatcaatctcccccttatatcaatgttgtttcattgtctagttgggaatgagtataagttatcaaagtgttgcataaaggaatcagatactctaataaatgtttgtatgttggttatagcaagtacaggaactattaaatgaaaaatcagaatttgaattacctcatttttaatttattcttttaaggtctgacagcagccgctgcagcagctgctgctgctaccaatgcagctattgctgaagcaatgaaggtgaaaaaaatcaaattagaagccatgagcaactatcatgccagtaataaccaacatggagcagactctgaaaacggggacatgaattcaagtgtcggtaagttttatgttcgctgaaacttattgtgatcactttgctactgaattacagtaaatgcttttccagaacaaaactgttggctacccattcaaaaagttggcacttttagcttgaaaacactgtatgtttgaggataccattttgcctctctaacaactaatgataattgttcattctaaaggaataattagcaacattatttttaattataggatcaactttatgtctgcaacttctaaaatcattcagctaacatcttttataatacaaagtttaatcaagagaattctaaaacattgagagtagctaaggtgacagagaaatatgtacaaaggaaaccctagactttacttttttattcttttaatccatttgttatcaagtaagaaacttactaccattggcagcaaaacatataaacttagccctttcatatgctgcccagaatacagattatgttgatgattaattctttctatagataatggttaccaaggtctctccttttaaaaatatgactttaattttcttgattttttttctttcctaccatatggagaaagatgaaaagttaactgtcactgtcaaaccaaaagggacagttttacctgtgccaactatccatttgggtaattcattttgtcaaacacaacttcaaatatgggttaatttttgtattaatgaaatccttagcatctggatgttgtggggcaaaacattttttttctgctattgcacttgtattgtttctctttaaaatacagtgaccatgctcaaaatataattaacaagagaaatttggatactacaagatgtatgcaagatactatagccaatgtatatttatgaagaccctaataactcacggccattcagttaaattctcttttccatgcagcattttcatagattatttcttaagttaattgtcagctctctactttcaatccattaagacatagttaagggtatataaaggaatactgtggattttagtaacaatcattttcacaagagctgtctggaaacatacacagacatgaatattagagtaaaatatatagacaaaacacaaaatactgtttcagtgatgctaaaaggcagcttttgtaatgtaaaaaggggaaaaatgcatcttttcagcacaactatgtaagggaaattgcaaaggaccagcagtagtggatttgaatggagagtaggtgtgagtgcgagttcctagacggatgaaaagacatggaagagagccaaaagagatggccctacaactgcagaggactaaggataatatctgtgctcatgtttgtaatgctcctggagggaagacagggagggatgaggattgtttcggtcatggtttacacacatatatttagacatttaaaaattaaaacagaattgaagcaaaatgcaagaattataattctgtttttagaactattactttaaagtaaaagccttttattagactgagaaaatggggcactgttggacactttttaaaacaagtaattagccacttatacattatatctattattacaaaacaatctggattgttttcaaaattttagaaaaggaggctgttcatgaaggctgttcttaatagttggttttatgagaagggattcttaaaataggcaatttaacaacatttaaagcaaaacacattaaaacatggtatctctgtttgaattttccagagcagaagttggctttgcagaaatcaacaggcataagataaagagaacatggttcataattaagcatcaacatatttttcatatttgatagtacatgacaatatttgcctactaaccaaattgtagcttactttaattattttggtacgtagcctatcgcaatgacttaaaaacaaacaatttgaattttcttttgtattttagctggaataaatgactttttttcattaaggtatgcagttgatggatattactattttttagttttgacaccccccatccaacgccaaaatgaaccaagagcagaaatttacttgaattttcctagaaagtcttaatagtttgagattgtgctaacataatatcggtgttgctgctagtccctaaggcattcaggtcatttatattagatatctgtagctgatttgggcaaaaagatgttatcattgtaattttcatcctattctcacatgctgctgtcctctaagaatttccaatttataatatccttcctgaacaccttcaccccaggtatatatctagagatcaagtaaagtgattttgggagggatgtggtaatgggggaggtacaaagcagtggtgaaggtgggggttgagctgcatcaaagatcaaagcaattcctgaattgcagctttgatggccacaatcttctctggttctgaggacaatgcctgcctcttggtaagtgttcagtaatgacttgctctgtgactttgtaaagtatgtaaactttctgagcccaaaactccatatctgaaaaatggcataaataatagtatcatatcatgagaattaaaatacttgtcacattatttattacaatgtctgcttatcaagttgtttggtcatcagtaaggttggtagattggggattgcttttgctattattattatgatttcttcaaatctgtcctcctggaaatcaccttcttcctttcttaccaccatcaactgcttccacctgcttttccattgtctctggtagctattacttgctaagctgcaggcctgtgaggagatttcagggcagctgttgcatcttagagattttgtaggacattcaatattagctcattctaggaatacaaaaataatcacaacacaggcccaggactcaggggcatacagtctatggatgagataggtaggtaagcaggcagtcataacaggatgtgctgaatcctccaggagaaccgattaccatgaagtggttaggaagcggtgctgaagcacatgaattctagaaggaatcccaagaatctccaaggcctatattttagaatacagactgctctcatgaatctatcaactgttgactctttgaagtagtgaaacccttcagaggggtgctacttaaatgatgtattgttgctactcagtcttgcccaaatccggtgacatttctgaagacaattcaaggctcttgttttctcctgcactcatctagctcataagttctgttaaacattttaggctttttttttttttttttgtaagagcgttgtttttttccttgattgtaaatgaatccttaaagccccagataacagattatgtttttgctttgtttggtttgatttgctgggtaagacgacaggaaaaatttgtatcacacaacccttcccggttcataataggaaccttagaaattagccagaaaaagatgtttaaagaaagctttgacaatggtgaataattattttatatcccaattttacatggtaaccttgagctcatatctttccaacaaaatgatcactttaggaggaagtgagcacctgaggatagatccgagtgaggcatcagcacactgagtaaaatatatggccatgtcgccattctccctcatccacaatcaattggattcttttagtttaatatttacttgctaagatgagatgctagtctgcatggtgataaacagtctgctcttggcatctgaaggtgacctgtcagttcatatggacaaatctcctgcttactgaaatgtacaaaataaatcattaaagcaggcaggtgctcattcccagatttaaatcaccatagatttatgatttgaattaatgcttcatttggccatagaaatagatgctgagacagatgatatgcactggttggggtttccatactgtagccatcctgatattgattactgagatgtctttgcaatctcttgtttatatcaagtactatcttgtgacaggttggctgatatgagctacattgcagataagaaggaaaaatgtcctggattctttttagtggcaacactatccacaacatacaggccagataagttgctattttttttgctttaaggactgatctacataaccagcttaaaaaatgctgcttggaaattgggactgggataatgcaaaggcggaatttaaaaccggtgaacccaaggtcaatttgatagtgtctatagctatgttttaatctgtttatcctttttttggcattatgcacacttttgagaatactaaattaatcacaatcagtttaatctaaataaaggaaacttaattttacttctagtttttaaatagtatataaatattgacatagtgagcatctcttaatcgtttctatgttatttaaatacttgctaaacctagtatcttactcccttccttaatgacaacaaaggaagtaactctttaaagataaatacattaaatattattcccaagtgcaacattttgtggagtataatttaccaagaggcaggaaaagactgcatttttacttctcttaacattttatttaaggaaaacactatgtatacagtttaaaaaatacttggaggatttaagagggacctttgccactagctaatatctgactcatagaactggtaaacagctatcaacaatagtagattgcttgcttagtaggaaatgagttcatatctattcaaaatgtaatctcaaaacagatgtcccaagaaaatctcattgtttaaaccatagtcataaccttctaactgctgtaatttctttaaggaagggaagtacttgtaagactttagtattttctctttctgaacattgtggaacataggcaagggtacactaatgccctgatcaacaaacctgaacacatttcacatgctcaaaacatatgattgtttttcattttctcaaacttgtaatcgttacaagaatgtagaagtttcaagtaagattaaggacttgagtttgagaataaagccgtcaccttcaagggtatttatcactccttagttcttctattcctcaaccaataaaacaaaacaaatatatgaagggaaaaaaagccaggcagttaaagagataaaattatcttcttcagctcaccctactcttatctttctttaattttaaccattcctgcagaaacaaaatagtttatgctggagtcatttcctttcttctaacacatgtgtctatttggaaggaaaagattaattttatgatttcaggaaaaactcttggagaccttgagaaagcaaataaaaggaaactgagaacgcaggccaccaagcagagctctgcaattgcacattggattctctgccttggcaatgttaatgaacctcaaatccttcctataattagatgagggaattgcttatattttcaaacagatgatgctgctataatgaaacgattgacagggaatttaagagtgtctacagtagtcatttggtttctgttataaaaaaaaagtttaaaaagaagattggctttagacataggtcctgagagaggtagtaatttacatagcatgctatgacaggtgtctttgtatagtaaggaaataaaatggaagactagagaaatgatgggcaggtatagcaattttttcagggagggggtgtcctatgcttattctgcttaggttctttaaaaggggccgagactcaagagatggagccggattgagtgcacagctgtaactgctgatgagctaattgctccttatctctcagccccattcatcttcattttttaccaattactgagaattatctgtgttctcagttggatatgagagttaatcctttttggttaagctggcagtactgtgagcagattccaaatcggagggtgaaaaagccaaagcaagcttgctctaaaaatgtctccagttcaattacagtatcactgattcacaagaaatttgctattgtttaacagattaaatgtagaaagtttttttgtttgtttgtttgtttgttttggtaactagaatgtttttctgcctaacaatgatttttaagatctttcttcctgcctggtgagtaaaacttaacaatattaacagccagtcttgtaaacgtggagcatatacaagactaccctaaaagtccagaaagattctgacacatgaaatgagaaatattttagaactgatagctgtcaattaatatataagtagtttaattaatgaatttgctctctgtagcttcacatgtggtcaagaaagtatgttcaaatataaatcttttcacaaatgtcccattagtggatattttaatggaagaccacataagcatctcttaaaagtataggaaccaccatggtttgtaattcaattgattaagaataggccatatggttaatatcatcccctatgcaaaagatatcttcatatcctgaaatttttacacaaaattgcttaccccaataataaaagacaaaaaatgtactaagctactattccatcaatttaaatgcatttttaaatatttactatttatggcaatttttcttcattatgtattttaaacaagatagagaattaccagtttgacaatgattaggaatgttgttattaaaacagtatgtgcacttcactttcaacagctttgaattagagtctaatgtgaaaatctaaaggataaatggctaatttaatacaagattatcaaaacatcattgtgtaaaatgtgaatatgttattgtgtgaccaagtaagtccttctagacacagccaaaaactcaggtaggggagcagagagcaaaataagtcagaagatttagcttccagtaataatgtagttaataaataacttaactacttagataagtcacttaactgctcgtcttttttatttaataaataaggaatttttgcctaatttctctgttggctctaaaattctttgatttttgaaacctcaataaaagataaagggcaaaaagatatttttgacagtaatttttaaaataaaaaatcagaagtaaccacatgttccaaaacaaggcatccttaagtatactataacatctatttacatattatgcaagcattatatgatggataagtattgacagtatttattttgaatataaaaaaaggatgatgccactttttctaccttggtactatgtatccttttcattagggtttggaagaggctaaataagagttaacattgctatgttattgtggaaaaattatgaatattaaaaaatatagcttaaattagattattttaaaatgtcatatgagtatattaataactgatcattttatgaagctctttttcattattttctagaaattggatagcattattctgcattttctctcataatttgtttttgatctttattgttcatgtaaaggaatagaaacattaatgatggcaacaggtgactgtggaaaaatacatttctatattaaaaaaatcatttttcactttgaaatatttgaacacatattcttaaatccatttctatatgtaataaaatcattacagcatgatttataacatgtactagtttcctatataaactattaaatgtatttttgatgcagataagcagaaggcagaaaatatttttatttttgaatgtgatgtctattccacttcatgaaaacttttttttacttatatggacagttggagaacataattcaaaaatattatgcaatgtttttgttttgatttcaatattgctaattctaactaatgactagataatagagtaaacctgttaattcaagcatatcatattaggaaataaaagttaagtgattttatttgacactatatcctcatgtaattataaaatataaggatgtatataggatgtatcatatatataggatatatcctaatgaatatgttatgtggtagactccattacattccaggaggatgaatatgttttcatcatggaaagtcctggaaatggtaattatcaacctacaaaaacatgctatactgtttacgtaaagtttgtaaagaaagtaaaaagaaaccacatatttcagtgtaaaataaccccaggtcatattcaatttgtttaagatcagacaattctttttttcttcattaatatgatactcgattgttttatatttgaatttcatatgattgatgatgagggattaaaataaatatttaactttgttttataaaatataatgtttgctaatacatatttttaaatatctcataatgtcttgatattaaaaatatatgtttagagattttactagggtgtttgtagtccaatattgttttgaatgtgtgcacacaagcttataactctgagcccaatgcacctgtcaccagacctagtatttcacattcacgtgaccgtgattcatctctcagttgtacaaatattcccaaattatacaaaaccatttgtatcaatcatgacatgtgaaatctaatataaaatagtgaaactaagcgataataaataaataatatagtagttgacataaatgtctaaaaatgtcaattcattaagatgaaataatgtagcacacatagttttgcgtgctctttatgccccatccccactaaatgaacccagataatttggaagataggaaagaacggaggatttaaatatggttttctttaacagcaggtcataatggaaacacagacccttacattcagtgctgagagaattaccagtttgataatgattaggaatgttgttattaaaacagtatgtgcagttcattttcaacagttttgaattagagtctgcactaatgaaacggatacggtttccttcacaaagggcagatctgttagttaatatcgctgcagcagtgcctcgcagaccatgcctttagctctatttgtatttcacagcatgataagcaaagagtgttgattttcaaggatcctgctgatgaaaggtaatggcattattacatctttatctcaaaagcagaactgagtggtaaatgatttttttctatgttgcacaaaagatttcttggttagaaagccttttttatttctttacatcgttttagtcttggaaatgatatgttattatttaatgtctgcacagcaagcttgaaagcacctaatagcgaatggattggaagtgaagtacctcctgctcacagatatggatcttctcagtcacacgctgtaccagctgtcatcccagccatactgctgtgatttaattagtctgtttatgtcctttctaataatatttccatctctatgaaagggcaaatgcgacagggactttttccctttttggttctgcagactaaagaatgtggcctatatctgatatgtggggatgcaggattgaatcaccattcctgtcacttcaagctgttgataaattgttcggccaaaaagtgtagtgtacttacttccttggggtcatttgtaggctgggagtaatagctgcatagcgacaaagaagtgtgtgtgtgtgtttgtgtgtccagttatatacattatatatgtaatatatacaacatatatatgcacatagataacatatgtgtgtttaaaagtttaaaaattataagaaaatgtgtactttgcatttttatctacctcatgcatggctttatggcacatatttaagtctttttatcaattgagttcatctataattgcagcatttcaggaattctcaggaaaatgtttcacttttctaagtaaaactttaaaaaaaataaataattcatctatgattttacttctacatcagtatagattatgatctttggagaaaatatatgtttcatactggaagatactacattttaagatatctgagaaagacatcatcatcctcataaaacatttaatatttatatctttacttagatttttttcagaaagcatatttaacttaaaatgatagctgaagttcaaaacatcacactgaacacacaaaattatgtaagtatatgtaaattaataaacaaatgtaaaagtgttatgacattatttaatataatgtgctgattaataatttatactcaggcagtatgccatctgagtgacaagcctacttgaaaatccagtggccttagaaattttcttctgctttcagattctatgaccctattatgttcagaagacagatccatataatagagctgaggggaaaaaaaagatagattttcaaaatcaatttcaatagttttcattttactcatgtttgtttttgggagaaatagtctttattatttataaataatctgttaatcagttctatgtgttttagtctgctttttggaaatagtttagtgtttcttcatctctctatagtttaagtgctgaacttgtgtcacaaggacttctagattatcttgcttttgcttgtatctttctgtttttgctcgctcatgcttcacatttgcatatcctaactatatttttggaaatggccttattaaaacaatgggtctatcagataatataagtctgatattcactttacataaaaatattaaagttaaacatcttatcaaggtggtcaaattagtttgtaaattattttctttagcaatctgaatctcagcctcctacagttaccagttttaaaaacacacacaggcacatgtttagtttcttctggtactttcacatacctgccactgtccaagcctatgtctatatcaagagaaaaagctatcgtctagaatatattaaaatacatgtatcaaaatgagtgtaaatattatacaatttcctatttctattagtacatattggcactgttttctattgtttagaatccttacttgataatatatgaccttagcaattacataacttagctagacactcatacacaaaccccacataattgaatccctcctacatttcagcttccaagaatctctcattaacttaatacaaatataaactgaatttactgaatatattcatttttgtaatctgttttcttaattattttattttgggaaaatatagatatatctactgtcttttcactgaagtacaatttcaatttctctacatttactctgctgttgaacctaaatgttgacgattaagttatcttgacatgaaccatttgatgctttgaaaaaacccaccatgaagcatttgatggtattttttattaattggataaatgaattgtgagatgtgtgattgcatgatgatgtactcatttagttgttgctttttgcttttactaatctctgtcatattggatttataaatggaacagagtgacctttgaaactgtgatggaaatgaagagataaacacaacttgaaaggacaaaccaattaatatcaatgtgtttgttacacatacatgaggaattttaatcctttgctctctgcagtacatttgtggttcatttgttgagtaagggagcatacttttttatagttacagatttagatcttactttttctaaaatatataaatttatatgtcaccatatatatatatacacacatatatatataaaacagaattagattatttttagtgcataaaatgttttcagcactacctttaaaaattttgacaatatagcctttctagaaaacatttaaatatgtattcacacctatgcaaaaaaaaatgcatataaggtattcatgtgcattcatcttatgtattttaaatataaatacattgtaatcttaagtgcagtaaattattgaatagaccttggttttgtaaatttagacacataattgatcctctgccattgtccctagaatactttctaaaattcctgattcagggatcatcaataaagcatttattattttaacccattgacctgtaatattaaaaagtattttttaaaatcaacaattatacttgagtaggcttttaaaataaaatctgagcagtcatttatacattatttttacctcgtgccttccccagtttttatgtaattaggtttatttttcttaaaaaaaaaccctaattctgctgtagtgtggattttagtacacttgcacattctacttcatttaatagcttaattatagaatataatcaatttaatatgcaggttttgaaatattgccattgatgcacaacaaggaaaaaagtaatacaagcttgacattttgaaacactagcattgaaagactttaacttctaattgatttttaaaagagttccctggaaaagtgagctcagaaatgtttataacagctttggcaacattccaaaatgtttaccacaaagcataactcagcagtttctgagtttttctatcaactaagaaagatgtgtcctataattggcttaatccatgttgatattgaaccccccacacagatgttatctttttaaagacataaattctcaaaatgatcacttcaatataagaaatggcttcactttttccaaccagggaaaaattctgaacaagaaagttatggatgagcaaggggtatatctttatattttgtgaaattacatattttatttcctccttgcccttccaaaccttgtttagtaaagctgacaaaaagaggatgcattttagatatattaatatcatagtcacttacggttgactgtaggtgtgaaaaacttccacagccagctaaaatgttaatggatatgacatccattttattttaacaagtgagcagaccaaaacaagtaacattgaacgcagaaattattttaaaaggctactgctaagtattttttttaaaaatgattctgttgactagttgtttgtcagttcctgtactttttttattgattgcttttgaatatatagccccatgattgatgccaagcctacgtccgtgagtgaaaagagctcaatttacacagaaaatgaatatacaagctttatttatatctgtactttctaatattaattttgtaatgtggtgtttctttgaaagaggtcatagagtagttgtaaatgttgttaactattttattcttccgggtctttggttttagcctatttgctttttcacaggtgtgattcagggcaataatgtgatatttcaaagtatgttcagccagaatgaatcacttattcataagcatttcttttttgagatgaagactgcagcataattgtataacatctacttattcctccaggaatctggagtgatttgtggtttgaaatttctgtatcataaactcatgcagtgcaggcagtattacatttagtcaataaccaggaattctgattagttggctgtaaatcatgaatgttgagaaataaaggtgacaaaaacaattaataaaaaagaaataaattgataaaaacaggtaatacagtagacagtattccctaatttgtcaaaaccatctataatccagcatgagttctaagaaataggtctgcatgcaaatgtccctcaataccaaattcacatgttttgtaaaaaaatttgaccctgctgggcagagtggctcaagcctgtaatcccagcactttgggaagccgaggcaggtagatcacctgaggtctggagttcgagatcagcctggccagcatggtgaaaccctgtctctaataaagccgggcgtgatggtgggcacctgtaatcccagctactcgggaggctgaggcaggagaatcacttgaacctgggaggtggaggttgcagtgagccaagatcgcgccattgcactccagcctgggcaacaagagcgaaactccatctcagaaaaaaaaaaaaaaaaattgaaccccgaaactgcattagaaacaaatatttaaatgtcataattctctctctctctctctttctatgtatatatatagatattcccacttttacactattctgaatccaataccctattcttttctcatttgttcattttagagacaggatctcactctgtcattcaggctggagtgcagtggcaggaaccatagttcactgcagcctcaacccctgggctcacatgatcctcctgcctcagcctcccaagtaaataagactacaggcatatgccaccacacctggctatttttctttttcttgtagagacattgttgcccaggttagcctggaactcctggcctcaaacgatcctcccctcttggactcccaaattgttgggattactgatgtgagccaccacacctgatcttcttttctcatttagagaaaaacaaaataagcaaaaactcctgcacataatgaaattggacataactttcatttcttaggctacaatactgttccagtatagacaggtttgacctaaaattccaagatgcatgcatacctgtccttcatgcctccagctgttcatgcatgcatcatttccttttctgttcatcctcacacagctccagtttcttaatactctgtaatatctacctctagtctccccaaagcaatctttggaagtaagggggaggagagagagagccaaaacatggaagtgaaaattgggaaacaacagaatgtttgtggttcagcattaaaaatacaaaatctggtgccatgtggttttggtgtaaaacatgacttttttgtttgtttgtttgtttttgccattgttaggacatttttgccttcttacttagcctctatgaatctcagtttcctcatctgtataataggtataacaatttgaaatattacatagggctctttggggattatttgggttaaattagttctctgaacactgcttgatacactgcaatcactattctaaaatttcttaagtaggtaatagaagtaaaataataaaggtgtacatacacacacacacatgaacattcatagatgtcttctaaaaagctaagactttccagtattcccagagtctcaatgttagttcaaatcatatagaatattgcctcctctacatgccctcaacattcatttcttatccaagatcttcattagttgatcatgactgaatatttatccaaagagtgtcttatggattatttactgcagtctctgagcctgtgtcaagctcaggaaatatgctacaagattcagattacattgctacactttttaaaaagtacgggcacacaggaagaggaaagttgtcagttatttcatctgcatatttttaaaaataaatcaataatcagccagtaaactttaattgaaaagttttgtctcattttatgttatcagacaaaatatgtactccagctctaaacacagacattactttattcagtgcacataagacttcctttaattagcccttaataagcttggtttaactgggatttaccgaagaacagtggtcattaacattagccagattaagactgtgttaattactattgatagataaaataacgcctaaaaatggtttaaattatttctacacttatgaattgaaaagaagtttgacacttttaaatagaagttgtattttatttatactttaacattaaataatgacttctttacatgtaggcctacaacaatagaacataagcttttatagtttaagttttacagcttctttaggtttaccataaacatgggataatcttaaaatataaattttgattatttcctgggatataaatatggaaatttttacatttacttttatgatttatgttacatgattttagttagaaacagataccttacttatacgttatcttcagaagacttagttatctttttttaaaaaaaaaactgatagattcaaatgatttcttgtatttggagaggattttgttacatttgtggcttttttttttttttttttttgagatagagttttagtttgtcacccaggctggggtgcaatggtgcaatcacggctcactgcaactttgacctgctgagctcaagtaatcctcctgccttagcctccagagtagctgggactacaggcatgcaccatcacacctggctaatgtttttattttttgtagagatggagtctcactgtgttccccaggatgatctgggacccctgggctcaagtgatcctcctgccttggcctcccaaagtgctaggattactggcacaaaccattgccaggcatgagctgccctagttttggcatttttatattaatgatgtcttaatgtttatccttagccttggtgtcacttttccccatcatatatgtgtgtttaatagtaactgaaatttgggttttttttcctccatgtgcataatttcttggacattatatcaagttaagctatttctcaggattctgtaaatagtttctgtgttatccattcctacatccattctcttgaaactactcttgcagaataataatatttattggattaatgtgtatgaaagcaggtcaactacccgtgaattctggatagacaaaaccaatggaattctcctcgttttcattctgcataaaattatgcagtccaatggttaaattctatagttagtggtaatatactctcccctccatgatgatttaaaccattctcttcattaaaagatgcataacaagaaccttcatatagttccaggcaaaatggattataaataaatacaatcttatgcctctgcatggactctgactttggtcagtcttccttaagctcagtacatagcaatctttaagaaaacaaacgaacaaacaaacaaactcagatgctgggcgtggtggctcatgtctgtaatcccggtactttttggaagccaaggcaggagcccagcctgggcaacatggtgaaatcccatctctataaaaaatacaaaaattagctgggcatggtggcacacacctgtggtcccagcaactcgggaggtcgagatagaattgtgtgagcccaggaggtccaggctgcagcagtgagccatgatcacaccactgcactccagactgggtgacagagggagaccctctctcaaaaacaaccacaaaagcccacaacaacctcagacagtcaatctagaaaattaggtttcatccttaacatgtgtaatctgtttattcttcctccaaaccatatctaggattcaaattcctctttgcactgcatccattgccagtgcgataactcaaattatcagcactccccacgttggccactgcagtaaccttaaccagacttcctgttttcactccttgtctttttaaatcctctcgccttgcaacagctacagtgatgattatgaggcataaattcattcataagatttccttttaaaaaatctttcaatggcgtttcattgcactgataataaaattcaacttccttaacatagcctgaaaagactctgcataaagtggaatgctcctcacctcctctctcaaaactcttgggttattcttccccttttcattcttcctgccacactggcatttctccagtttctcaaacagactacgtcctttctttctgcagatgttcttaaaaactggccagtggatctctgttctctttgttcttaaattttggaattcctactcattttccagtctctgcttaaatgtctttcctcgaatgctaaaattaaaatcagttcttcaagtctgctccatcctatatcaccctgttctttctgttgcactttgcacaatctataataacatctttatttgcaagcctgtttgcttcataaccatcgtccttcctgagaccatcagcttgctgagggcagggcaggcctggccacattgactggcatgcactatcagtcaattattcaacaaatagtcctgaatgaattcttaatgaatgagtactcactaagcaggaatgcttttgtatacattatttttgttactacaggctgtcttattcatggaattcctctagatgcttttccaatagaatatttccttcattttaagctgcattttgctcaatgtcagcattccagagttttactatgtagggtgttataatctcattttcttgtacaatgcacgtctacatttacttattcttttcatttaatctggaacataaaacgttaatattgttggcatttccactttacagatgagtaacttgaatcccagagaagatcgttttttgcttgacattatgtgacttttaaggtcgtgtaatgaaggcagggtctactgtttggactcccactttggtgtttactccaggttattaggtagggaaaataaggtctaatctttttttttaagaacattaaattagaaatctagaaatttgagttctagtttagttttgccagcatccatcttgttgaccttgatgacataaggtaaacattttgtgtcttactgtattaatttggttgattacagccgtttggaatggaaagttctcagtttatataattacattattgtataatataatataacataaggaattggtatctttaagtcactcaaattaacctccatattatggagtgaggagaaaggattctactatagcatttcaggagcataatatatatacagcgttgagatttctgtggccataactcataacactatggagaatgtaaaataaaatttggatcggtatgctatcaactttgttatgtatcactttccatgttcttacccttgcccaacaaattcccctaaacttataacaacaaaaatatcttttgtgatgttatatccttgtttaatacctttttattcatcctcatacgattgtccctcaaataatatgtattctctgtatctgagctcttttacatagtattggattatactataaaccctttgtggcagggaccttgtctttttatttgctctataaaacaccatgcacatcttgggaattttatgaataataataaaaaggaggcaaaaaagctttcatcagcagtgttttattttgcatgtgaatttagagatgaattcataccattgtccatatttctggagaaatagctgcttatattacaaaagttgactacgaaaaaagcatgtaatattaaatctgaaaatttacattgctggtatagaaaaaataaatgaagcaatacaatttgctttttcctgccctttataaaaatattgccaagtctggcatgtggttcataaaatcaaacattttctaacacagctgtgcatgaggaaatgaaatacggaaggtataagaaaccacctgtttgccagaacagaagtttcaaaaaagataaacagcagaattttacatgaatccctgttgaagatctattccgctattaatactaaagccttaacacttattcttcaaacaggtgttttgcatgtgaattgaaggctgaataagtccatggacgattcattagtaaacaccatttttttaattcagtacacaagatgatattgaatacaactgtcaaagataattttgcaaccaattcagttttaaaatctaaaattataacaaaccgcaaattcctgtttattccaaatgctctcctttcccttctttatcttagtttcaaaactctcatgaacttgacagtgttctcccttgatgaagagaaagtctgaattatgccataaatcatactgagctaccagagaaattcaaattgctgtaagcacaagtgccgagggactgcttatacactgcctgagccataatgcaacgttcacaacgagatcattgcatcataatctcattctgactgtgatatgctttgtgtgtatggggctcaaatgtcagagagagagacaagagtgattatcaggttagattgctctcctattttaggttaaacaaatgatcagaaaaatacattagcccgtataaaatatttcagaattaaaaacttccccaaagatttatctgcatgagacacttcttagtatgctttgtctaggtagatttaacactagaagttctagaaacagttgagagatcttttaagatcctttttcttcttgtttactaagtgttagtaaactctttgcaccccaaacaccaagcttaaagagatgtcaaacaacaaaaaacttcagaatatttctaatcaatgtagaaaatgtatatatggaaaaattctggtgaaattattattatactcatatgatatgtttttgtgttatgttaatgtattgaatctttgccagtgcctatgtatgtgcatatgtatgtctctgtgatttatgcagatgctctctctttaagatttatgcttggcaattatgagatgctttgtagtttgttctcatatataatagtaggaaattactaaaaacaaaacaaaacaaaaactagattttcccacttctttgcttgaacgaggggtagaaacatcactttgaatgaaatagtcacgaccatcgtaactttcatattctgtatgacagtagaattctgttcagtaaagcgaatataaacatttttgtacaatgctctataaaacatacagatatccctgttttagtgtccagttctcatttaatatcagatcagatagatattatattctagttctatttagtggttcatagaacctaattatgttgtccagcatcatctttcccacttggaaattctaggaagatgaccacatccactgcaaacaagaacattttttttttctatcagtgtagtttgcctcttttattttacagttttgtatcttatcttaatgaactggccatactttagaacaaagttgaatattaggttcttcatttcaaatttataaagactatgtctcatttctccctgatatatgatgtcctttgagggtttctgtaagtatatttttaaaaatgagaatgtttcctttttttactgactaccatccagaatgggtttttaataataaaattttttatatttatcaagataaaaagtcaacttctggctgggcgcagtggctcacgcctgtaatcccagcactttgggaggctgaggcgggtggatcacctgaggtctggagttcgagaccagcctgaccaacatggtgaaatctcatctctactaaaaatatacaaagttagccgggcgtgttggtgagcacgtgtaatcccaggtactcaggaggctgaggcaggagaatcacttgaacctggggagtggaggttgtagtgagccaagatcgcgcctgggctacaagagcaaaactccatctcaaagaaaaaaaaaaagtcaacttctaagggttttaactttttaactagttgtgtttactaaaacaaatgactaatatttcataagtctgattcattcagtcttcaatctagactaaagaagcatggtttcctgtttatagtatgtacacagcaccaggaaaacatcaacatatattcttaatattcttatccacatatcattgtgaaacacacgcggatgtttgtgtgtttatatgtatgaactaaaataaattgcaacggtgacttcgtatggtcacaaaaagagaaagatctgttttctggactagagatatggatgatgtggatttttttttctatgtatattttttagtctccatagttctctagaactaggcacataataataaacttcatattaatctatcatatttattggtggtttagaataaattttatactattgttgatgttgcttaatatatttattataaaattatacttgctttaaaggaaggattattacttttctcctttcatggcttagaacaaagcaaaagaaagcaaacaaaccaaaaatatcaattcatgtatcttttgtccatttgcatgttgggtagagttcctgttttatcttcctcagttatgccatgtcttcataaggagaggtacaattatctttatatcctcaaactatgcccatgtattctatagtatatactcaggaaattcgttatggccagtgcatgtaaagtttgcaaaagctcctattctcctattggcacagagcatgaaataattattataaaaaacagaatgaatttgccatactcaagcccatacatttttccttttgaagaatcattatacttcagtccttattaattctagaataatttagttttaggattaattataagtgaacagatataccatattccaaatttggaatattattcactgttgatataagttgagacattcagaatatgatgtgttaatctattgatatttgaggacttgagagtaaagtttatttttaagaatttctggtagccatatggtaataaatactgtctaaaagtctaatatagagtgaaaccttcaccagactattggtatgatagtctagtaaggtcagaagctcagaggttttatccatgctattttatacactacttatgttcttaacaaaccaacatattcattttctcttttgtaatgggtacatgatggacataataacatcttgttaatagttttcatagaagaaacgaattttaatgtgtattagtcttttgtaagtggatttgtttatatgtatgctggatgttattattacccacatggtttaaatctatatccatgataatatacatactgttcagaaaaagtatttttctgatgtgtatataaaaatgttttgcaagagattcacttgcaaattcagcattatctctcttaaggataaattcatgaggatgtgtatcttacccattttatatatatatatatatacacattgtaatctctattactaatatgcctaattcataatctacatctttctcattaatatggaaattgttacagagtatcatgattgtgaattaatacatatcacttaagcgttctgggcatcagtatcttcattcctaaactgagggaataaatgcagtaactttcaaaatttctcattgtttaaaaacttttattttttatgacactgttcctttgaaactgatacagctgacaggcagtctgaattttgttggtatctttcaatttatcacgttttaaacactccacaaagtcccagcccagaaacaggaacatgtgtgctgttgctcatgataatctttgtatatgctcagtgaaataagtttaccataacttagtagtcactttcatccagagaatttttcctggtggtattaaaacacaaagactactatcacactggtctttaaggggaaacaataaataaaacacaaataaacaagctcctaagagacaattcttattcacatttgctgatgattagaggtacacttggctttgaaagtcatgcccatttaacacagtatttttaaaagacttacttttttccatgtaacagcgatatcagaaatgcatttccttgagttactttgaaaaaaaattttagaattgttacatggcttagtacctgtacaatctaactgtctttattgagatcatagcatataaggtagaatgttttatacaaaacaataataagcctgtatacatgaatttaaaacaggaatttttaaatatcaaatagaagaaatgcaacgtaaggattaaattatcatattgtaaaaagttatgcaggtgaacaccttgttattacaaatataaaatgtagcctgaataaatctatgaaaagctcttttttaaagtgcaattatatcctgtaatgtgtagtttttcctgtcccttatgtttattttaattttaatatgaaagaaatgatcatcccattttctttgaaagtggaataaaggtaaaaccacaaaccttttgaaagaattcctttgttcccaatcacatgagtgttgttggaacaaaattttgccacctgccagaggctttaaaaactaaatcaaaaggctcactacttcaaaatgctcaaactaaaggtaggcttctggatgaaaatgtaatgactagatcattctcatcatacatttattacagtgcagcagaattgatggatcttttgctacctttcactagagaataattcataaatgaaaatgaaaatatttaaatcatgaatagctattttattccctcattctacctgttagggatctaacatttagggtgtctcactatgttcatattaaaacttcccaaaagaaatagagaggaaaaaggtgaagtatttctcacactagttaaaacaattcagtgttggcatgcttcattaactgtttgcatacaagagaaaagtgctttctgatgaagtggaaaaccaacttgggaccaattttccacaacataaattcaacactcattctacctcctgatacctttgtattcaaactatcaggaagattttttatatctgtcataccagtaatcatttaatacttctattttagattctgaaatccttgaaaatagttctattgtagattctttatttccttagaataattttaagatgaacatctactaatattttttcataaatgtgaattcattgaactgacagttatcaaactgatttagaaagaattcttatcatgtaagaaacataataaacagggtgttaaaatggacagcttaaacaaaatattgtttacattcaattttattctgtttctcctctctatataaaatatttgtaaatagatgtagatgtgtgtatacattcaatatatagttaagcagcataatgaaggtgatgtattaaacattactgcaagtctagaatatcatttattacagtactagcagaaaaatagtactctagtagattagcagaaaaagtgagtgccaatttgaaacaccattgttgatcactgtatcacaacagtgtagcttcagtgagataggtgagtcactctgccagttcaacacatgatagctgcaaagtgccaccaaacacaatgaagtcatccacagtccctactgagtctaagttattattcagtttattacatagcgttttgtcttcatcagcaatgttcaacaatcactttcaattacacggggtgagaatctgggagactgtcttcacttctctgtggttgtaaattcatattttctagactctgcatggggaaagaaaaaggacattataatatttttattttcataataaaagtaagacttattgaagaggaagaatctttcatttttcacaatatcataaaatatttctcttttaatgaattgctgtgagccaatgtttttgttgaaaacattctttgataaaagcttaaaaatgatataagcatacatgttttattatatgaaaagtaatcaattataaatattcacactgtgaagcattattttatcacatttagtatattcattcattatgttatttaaattttatttcattaaaacttggtatattattcacactaaaccaagtgatcttattgtgatttcataaatagaagtttgtcatactcgaacatatcttttgatattaaaaataacatcatgttatttcatttgtttctttcaaatataatatcatattacaatacattagttgtatcgttcaagctaagaatatattcccgatatgaagaatatgttgagtagtgtaagtttaatatttaaaaaatgtaattattgattcagtgaactaaatatattaaacatgtaaaacattagattcttttagtatacaggcatagtcatctttatggatttttcctgaaatgttttatgtaaatcaagagttttatctaatcaagctttaagggaatccactacttagaaaatattttaatataatgcattttcttaaagtgaactgcatctatagtgattttgaaattcaagccattttgcataaatattgcttatgcatgtatacatttatagaccactttgtcaatgggggaataaaaacaactgagaccaagagaagtgtttcggtttacatgtaaactaaatgagaccaaaggaggtgttttagttccctgtttgctattttgattaaattactgatatgcaagagagatcctttgaaagtccctttgttttgatttattagcagaatatgatgctagagctgataagataatgcttttgatgcaggaggagataaatgagaaattgctccattgccatgtgacacctgggttctctaaggtgtctagttttactctgttcatctattggctgagataacttccatttagatactgagagttgagctcagttaaaatacgtttttatatttttgtttcagttatgtcaccttcattagttttaattcctaaaaagaccatattattggaagcttataaagccgtaatttctaccttggaaaagtaacatttaacggtttggtttcatgagaaattgtccattcttctgagtgcatggtaatggtattggatgagttataatcagtcgtccatctggagtggttcttctgttggtctattgaatatcaaagtagtgaagttccactgtggaaagttgaaaaatttagcttgtctgtttttatttatctgttaggatacttagttcatttttacttaatcacttgatttgatgtttattgattcagtaagtatttttatagtaaatatgtgcttaggttttaaagcacattttaaagtatgagataaatgaaaaattaactaattggaaaataggatttgaaaatatcaataatcactgaagtttgtgaaattacatgaagtgatttttatattgcattttattattcattaaatatgacatcagtaaactttatttgtagagttttgaaaaaatgctttcattgtataagtcaaattttgtgaatgtatcccatcaagccccccacaatgtgacataatggcataaactaggagactaattagatatatcttcacaacagttatattcagcattgatgaaaacttcaatattatcaaagttaccctgacattcccttttgaaaatacaaataggcctttattctcctttgtaataaagaaacaataacttgtaatgttcataattttatttacatggagcataatatcggtatcacatacaaaatttaggttaattaaagcataaattttcaactaatgtaatgtatcccacatatatatctatttttcttgataggtaatttatataaaatattatttgttggagtatctatcccatttaaaactggccaacatataatattttaaaattcgttatttgtataaactagacactattttatcgtttcatgtgacacagaaaagaaaacaagttatacacctctgaatatggtggaatttttttagctatgctatcacaactctgcagagaggtggtttattttcctaaaataaacactgaaagtgatgcacagcccagccactcaatgcacacatttaacactcaccaggagggaggtttggtgtactgaacacactaagttttagatctcagaaggggctttacaacctgtggtgtaggcacacttctttgagtagaaagtatgtcattaaaatactgccctcttacagtgactttaaactaggatagttgcgattgtttttagtctgtacacagcatgagaagcattttggtattttcctggagtaatccaccattggtatacatgtcctaatgggggaaaccagtttcttcatgaaaagtaatattgattttaatccaatatgtcaaaaaaattcaatttttccaaaacaaacaaaaaagcaacgattgtggtgaccgttacattctgtatgtcactaccaaattgtagacaaaaattattaaacagagaaactgatcttaattttattacttcaatagccaattaaatagttaatttaagtggttctctgtgaataaaaagaaagcaacgtaattgaataaagtgtattttactagttaaaaatattcaagtagcttatgttggcatcacagaaacacattctcaatgaaaacattgtgtattgtattattaactcacagcatatgatctccatttctgcctccctagatttctctccccctgggatagtaacgatgtggactcacacatttattatattaattagaaatcactacctaatataattattctggcatgcacatggtgagtactgaaaatattattgacagaatttctccatttaactgtggtgttaaaaagatttgcatgtctaaaacagccttgattagatattgtttttgacgactctgctcagtgttttactagatgcacattaagcatgaggacttttagcacgtctgaagtaacatctgctctgtctttttgttgctgggttcatggtataattagctctatatttcaccaaatacaattttgctcccatggcggacaaagcagcatgaagaaaacataaataattgcagattagagaaacagaaggcaaagtgggtgtagatggctttgataaaaaagggttaaggagaatagaaggtcaactcattattaagaaaaaaaggaggcagttaaaattagatatggtttattgtaattaaagaaaacacacacagattttccttctaacaatgttttctatttgactaaataatttagtgacttgcaattatgcagtttattttatatttacttagaaaacactttaagaactgtgcatgcttggatacacaaaataaaatttaattattaaaggaaatgttgaaaatatacaggaaattttgtgttgctttccagaatgtaaaacatattttttgatagtgccatatttatagagtcaaattagctcaatgtagccagctggtcaggtatccatagcctgatattctgattttactgtgccttcaattaacaattagtcaatatatttgcatgagccaagggtattcaatgcatactattgaatgtttattaaatttgtaactgtttactgtatgaaaatatctagctcactcatgcctcattgtttagcattacacaaattacataaaagaatattgcataatatatataaaatatgtacaagagtcaaatgttgaaatagcatattctggcaacccataacatgggttattgtactattttaaaatatgctatatgatcagtggttacattagtttcaaaaatgtgaaatgtaattattctcatcttttacttttagactacaaactgtaaaacattttgacctgataatagagtactgacatttactttatttcaatcagaaaaaaagtcctcagaaatctttaaaacaaagtataagtttttgtttttgttttgtttagaaaaaagacgggcagagattttgttcctacaggtgttcctccaatagcacagaataagtaagaatacagaaatgtattctacttcactctatatctgaagcataaaattcatattaactagaacaatacaaggcaaataaaagaacagaaagcaagaaaaagtcataaattactatgtagtgatgcgttgaagacagtttcataaatattataaaaaatattttttccactacatgttttcctgttgaagaaaaagggacgaatatttctgtaatataagagtatatttttcatataaatagcaagtttaaatatattaatcccactgataatatctgggagattttgccatattcctgtgaactccagatgttcttgtccagcttgcttcaggcggagaaagagatcgaagaggtgcaaggacacatgtaaataaaccatttccagaagacaaatgccaccaaagaacactgcgttattcgcctattaattatttggttttcttttatctttgttagatagatagagaataaaaagcaaatcctactttggcacagatatgaatatttaagtggcatttttttttccggaattatggaacctgaattgaaagagaccatatgattgaactagttcttagaatcttctggagagattaaaaaaaaaaataactggagttacaccgaaccaacaaaagtataatctctaagggtgagggcaatgtattgaattttttatttgtttcaggtgattctaatgaaaagtcagttttgagaatgacttaattctagtctaattaccttttgatgattgagtcctctttatatacttttttaaaatataaacttgaaaaccattagttatcacatgtccattataccagtctatctgtggataactttgactgttagaaagaatttatgtaaattatgcataacagccattcacaatgtgagagtcctttaggtgtttgaataaaactgtagtggatccttgatttttattgtgcttattttctggctattttatatataaaatgatttcctggatccttcttttataattatataaatatgcatgtatacttgtatatatgcacatgatatatattataaggatataacatataatcattgtagttataaggacaggtaaatcaaattatatggaaagactttatttagttaaatatatccacctatatctcaggatttgggcatatatagtgtgaaaaactagaaaaactttttaatccaagttttagtccagccagtagtagtggcttacttatgtggccattatttctgaatgaatataacttttgtttatgctttgcagtattttaaagaaaggagccaagaacttgaaagttgtcttgccttgggcaagctactgtctttcgaaggatttgcatctactaattttgatttctaaatctatgatctttctacatcagagtgtctttcctattggttatattgatcaagcatatctgaatattttagttgtatttggtgataaacaattatagttcctctttctgtgagtttcaaataactgattaagacattcagatattgccatatgatttttttggccctattccttaataccagggactatgatttgatactaagactgaaaattatggtaaagacatttattctgctttctcatatcagttattttgtatcttcattattcagaggcatctcacattatatctgtgtcctctaaattatcttatgtgtgtgcgtgtgtgtgtgtgtgtgtgtgtgtgtagaaatgtgtttgtgtgtatgaagaggtaatacaaaaaggaaagtctttttatatacatgtaaaaaaaattaacattagcataattagtatgaaatcaatgagagggttattgaccatttcccatgttaataaggttactgattcaaaatagtgtaaatacagaaagtaaggaggtttatcattcaggggaattaaagtcaattttattatgtgcatataaaacaagatacaggtggagagatgtgtattaattgacttttcctgctctacagttccaattcaagaagtggacaatatagctttgagtgtctctcttaaaaccctgaagatggcatataagtaaattagatacaaaacttttgcctgttggttctgttcagaacaagggaagaggatgccatttttctacccctgaaagcccaggaattgtttaacagcatttccattgttcaggttgtataattcataaacctctttaatacctgaattacattacatttaatgaaattttactcctaattcatttgatttagctaaaacttgcctttaattttgggtcagagaatttcagcaattttttctgaagtagtattaaattatttaaaacatgtgaatagtgcagtcccatcattctgttaaaactcattttttagatgaatgctcaaatgtctttttatttatatcatcagcatgaggcttaaaattataataattttatcatggtttgacttattttatctttagtttttatagtaaagttttgtggtttagaaaaatgacatgtttagagctatacccttatataaataagagatttatccaaatataagaagaactctaagacctagacactttaaaaaagttagagctgaccctgatttgagaataaacaaaatataaaaataactagggtaaagttttgctaagattatgctcctttgcaaatgtggaaaatcaccagatttctggtgcccaagagtatctttcccacataattttcaccatcgccgagggagagtctgttgacttgcaagtagaactattaaataggttttctattttgaatatgtgataaatgatagttcaatttgaaagagggctgcaaatataaattttcgaatacagagtggtttaaataggcttttgagtactggcaactcaatcatggcccaattgggcattattttaggggaaaatttatgatgtaaatcatgagtggtttatatacattttctacatcacaaaagagtgtatagaatcaaaaaataagcgtcaggccgggcgcagtggctcacgcctgtaatcccagcactttgggaggctgaggtgggtggatcatggggtcaggagttcgagaccagcctgaccaacatggtgaaaccccgtctctactaaaaatacaaaaattagccgggcgtggtggcgcatggctgtaatcccagctactcaggaggctgaggcagaggaatcgtgtgaacctgtgaggcagaggtggcagtgagctgagattgcgccactgcactccagggtgggcaacagagctagactccatctcaaaaaaaagcatcaataaattttaaattgcaacatttatcaaaatatttatactgtgtcttcagttttagggttttccaggtcccattactgtggtccaatgaaacaaaattatagctagtgcatcttaatataaagggtttaattttatttctctttttttcctatcttatttctgcctattttttttttttttgacagggtcttgctctgttgcccagactggagtggagaggagccctctgggctcactgtaacctctgcctcccaggctcaagcaatcctcccacctcagcctcccatattttttttcctttttggtagaaatgtggtttcaccatgttgcccaggctactctggaactcctgggctcaagcgatatgcccacctcagccttccagagtgctgggactacaggcatgtgccaccctgcccggcctgcctttctttcaacaaaacaattatcctcttgttaataatagggcctccaattttttgagcacttactagggacaagatgctgtattttacttgtgtgactcaacacaatgtaacaggaaggtagggacagtgatgatcatcttttgacctagtagggaactgaggcactgagagaccaaatcaattccccaaggccactgatttgaattctgattggatgccagagtctggagacaaccccagggtgcactgatgagagccccatggtgaaatcacactgagggaggtagagaaggggtttcagtagaggacttttccaacaatgtttgtctttactgggaaataaattgtgtgcatttaagcccttgggccaaatggtaggtactgtataacactactgtgtaaaaacacatgtacagctgttttatttgtttttcatttctattatgtttaaatttaaaaaaattatgtatacttattgtgtacagaatgatgtgttgaaatatgtgtacattgtgcaatggccaagttaagccagcttacgtatgcattaattcacatgtttaacattttcttgttgtaagaacacttaaaatctactcttatagtgacctagtgttattttataatagacaatttgacctcaaataaatgtcatgaggttctagctcagaaaaaccctcaattcacgctacatcacaaaaatcatagcttattataccaattcttagaagtaaaccattgaataaatttgaagtgactggcttgagtgacatttatcacttcaaataccagttttctttcagcttgatttagacttatatttaattaaatcttttggaatggaaattaatattaaatttacatgcaatatatattggccacctgagtcatcttaggctatttgttgcacacttcttttatgccccctccaagtcttcaacctctccttgaaagtcctagctatatacctatttgcccacaaattttgaatataggatttatgcttctataaattcaaattgctgtttgtctgccaaaaatgtaattttcccctcattaacctacatttccagtgttctgttttctgtggagaccttccacacttgcatgagtacactcttcacctacagtgctttgttcgtacctataaagtagcaaatgaagatgtagccctaatacaacatggtgagataatttaactatttgagggttaggctttgtgatgacattgtcttgaattttcataaaacagtaatagtcttccttacattatccatctctttgtttatatgctttctgtaagtcatatatatttctagcacagttattacaagtacaatgtattaaaccataaatatgaacacagtgtatataaaccagacatttctactttgtttccaaaatccccaaagtgtataaatgccatggtatcttttcctctccagtaggctattagcgctttgagggcagaatcatgtcgtctctgtattttccagtatttggagtagtgactcacacggcatgcagtggttactcagtaaatgagttaaatgaataaacagttaatgaataagaatcctgaaaacaagggaatagtaagtaagctattttatattttcaagatacactatttccagtgaaaacctaaaaaatgaagtatgaaataagttcataatttgaggccatctacttatccattttattcttccagaaataaaaaaaaaatacatatatgtgaatgttagtgtccccacctgtggaccctacccttcaaaatggtgattcaagtaggagtttagtatgggacatcactttaaagtctctaaaaaaataagttcttggacctcttaccccaaatctgttaattcttcatttttctcatatcagttattggtaacttcatttttctacttagaaactgcatgtttgtgtccctgcagcattcatgttgaaaccttaatctcaatgtgatagtatttagaggtggggactttgggaagtaataaggttaggagggtagagtcctaatgaatggggtttgtgctctcctaaggagtgggcagagaggatacaaggagatgtttgcagtcggcaactcagaagagtttcctcttagaacctgacatattggcaccataatgtcagacttccagcttccagaattgtgagaaatctatatttgttgtttaagccaacaagtctttgggaatttttttatagcagtctgaacaaactaagacacttgttcatgcctaaaaccttggaaccatctctgattcttccctctgttatacatctaacatatccacagatccacctacttctttccttctccattatcacctgctggaattatcgtgaaagtctcagaactcagttccaagcttcctcccttctttttgatggtagccagagtagtctagttaaatacaaatgtcaaatcaggtagtttctctgcctataattatcccaaggcttcctatttcataatcagtgaaataatacaagtccttccaataacctacaatcccttccacgattgggctcctggattcttctctactctgattccctttccttcatctctcaccaaaactcacctccagccaaacagggctccttaacattgctctaatatcccaggaatgcatctgccttagagtctatgcattgtccagccatcttcttgagatcctcttcatccagagatccgtacatatattttgttctctcacctccttcgaatgctaccttcttattaaggatgtttatacataaccctattttagattgcaacctgtctcctcaatatgtagatactccctatcctccttccctgttttatttttctccacagcccttaacacaatctgatatgccatgtattttaactagtatataattactagaatgtcagccttgtgaggcctgggactttgttgtccactttgctcattgctaatcctagtaactagaacagtgcctacaactaatatttgttgaaagaatgaattaagagacatatgttttgaggcacagaaacatatgaaaaaataatactgcaaaacagattcaaccaagagaactaggggccggtttgttgatatttaacaaaaacattaatgtttccagaaagacctaaggagaaaaaaagtcctcaaaaatctttgcactgaaaaagtgatgatgaaacagttaaaacatttattttctaaatgtgacatgctctaggagctacacatcacttcagctcatgtttacacattatgttactataactgcttaaaatgtagggatttttaattgaattttatggctggtctacattgttgacagtaatttttatgttatagcttatgagtttagtcatagaaggatagagagaaatttccattgatgtaataaaatatctataaaagtaaaatggtgtttccttagtaggtagttatatctctctaaatctctgagcatgcaattataaataaatgcattttgagagtgattattttgtaaattaaatagctttctttaaacattaagaattaatgatatattcctagatttgttacctaaagtatatattttacacaatttccttttaaaaatacctttgtaatatatttacagatagaatcccaagactttctaaaaatttttttatattagagatgtccatattcaagtagattattttaatacacagcatttgaaaataagttcaatgtttatgtctttactaattagattttatttaaaacaccaagttatgaaaatatgcattttatgtttttctatattatgttaatatcttttaactagtttttaaaatggtcaatataggtttttaattggaaattatattgttaacctatacttatcataatcaactaattgattgaaatatttaagattttatttatttaggaacatttagaattttaaattttcagaaaatatacttattagtcaaattcaatatgaaccaaaacttcacttcttcattcttcttcatagttattaatagtcactcaagatattttacttacttcctcatgggaaatgatgatgaaaaatgggaatgttccattgttattgacctttaaaatctcttaagttaaggattatgaatacttttagctcaaagcatacataatcttgctattttctttttcttctacatattcccactcaacagcattttcttgaattttaaaatggataacattcatttgacattttgcagtctaaaaattaaattttcatgcttgctttgaatacatctgggaaactagaaatgaaattttgatagaaataaaaatgccactgggagtattattgattacccagaatgtgtggctttcatttaccagttaaaacatattagctaagtcatctggaaatgggttggcatctattctttcaatcattaatataatagataatttagatccattgtctgtaaaagctttcagatgatcataaaatgttagaacataaaagatctgattaactttctagaatctagacaattggaacatcattttcagagagtattaatatctccagattataagacaagcagtcacaaaacattggtttgaacatttataccatcttcgataaaaggatgttcctctctttcttgttaactgctaacttaaaaataataaaattaaaaataaatccccagtgccttttacattgtcccagctcaattcctggctttagtcaatctagcattctatttaaaactctctaattcttcctatttttctgtggtgaggtgctcttatgcactacttttattctcgtgtcaaaatccgtactctgaggcagctgcctaacaattacatgtgcttttacattctcatattttcctaaaattgaaaccattatataaatgttaattatgatttattgcccttatttggaatgccagtttactgaatgcctactctggaccatactgggttaagtctaggcaattcaaagactgaagatgaatactttacctttaagaaatttaaggaaactattggaggaagattgctttttctcttgtgaaaattgagattgtcacattctacttggatttccagaatttatcaattttaatatcagtttcaaattgtattcccttttacttgtaatgctcatactgtattagctatttttcggtattgaaatctgctcccctcaaatcataatatttgtaaagaatggtcataatttcctttctataattattataagttccaaattggcatggtaaattctccttttcttcttttttcttttctttttttcttttctttttttttttttttttttttttgagatagagtcttgctatgtctcccaggctagagagcagtggcacggttatgactcaatgcaacctcgacctcctgggctcaaatgatcctcccacctcaatacctcaagtagctgggaccacgggtggatgtcaccacgcccagctagcagttttaattattttttgttgcccagcctggtcttgaactcctgggcttaggtgattctcccaccttggcctccaaaaatattgagattacaggcatgagccatggcactcagcccctaattctcctttttaaaattttcaaagtacttctttctcctcctcatgccatttatatagcaggtgctttgtttatactcatcatctaatctatttgataatgtggcccttctctttgattgttgctatattacacagaatttttaagactgcaaaggtaatatggacagccacacctaacttttactaatttctgtagtttgtctgctacctcacaatgaataataagtagttattccctgtgaggtaaaattaactctagagaaaaagctccctttttttgttttaactagcttttttttggattctgttgtttggcatggcagtgatacaatggctttgtgtaagaaacgttaagagtaactttttaatcttgttcttattttctgaagtcatactagggcagtatttgatttagtaaattaatgtaacctggatgttctaaataccttaaaatgtcatcagatactacagtatttcttaaagtgtggttccaggtcccctggaagggagggttcccaaaatacttccagggagtccaagaagtcacatctcatttcataataatactaatatattatttacttctcttaaactgtcattccctcatgagtatacagttgtttgtcagaggctacatgactcatttcatcacaacagggtgaatgcagaagtggatgtcaaaatctaagtgacttctttcaagccatttagtaaagagttttgcaaaagtgtaaaacaaaatgttttgcttcttaccatatttttgcatatatatttaagattttttaacagtttttcctttctaatgtggtaactatttataatccatgtgtataaagaagtcctgaaaccaagatgtttgaaaatcactgatatgtagatctatggattataaaaaaagctcatgattttttagaatctatattagaaatcctcatgtatttacagtgagttgtattctagagttttctttaaaattgcttatagtcagtggaagtagtgtgaaggagaataaaatagtctgaaatgaaaaactgggaaattgaggccggtcgcaacagctcatgcctgtaatcctagcatgttgggaggctaaggcaggtggatcacttgagatcaggagtttgagacctgcctggccaacatggagaaacatcatttctactaaaaatacaaaaattagctgggaacagtggtgcatggctgtaatcccagctacttgggaggtagaggagggagaatagcttgaacctgggaggcagaggctgcagtgacctgagatggcgcccctgcactcccgcctggttgacagccagactctatctcaaaaaaaaaaaaaaaaaaaaaaagaaagagagagacagagacagagagagaaaaagaaaagaaaaactgggaaattgtagatgactttttaagcaatatgatgctctcaggaaggcggacaatgaagatgaactaaaagttattttcaaaatctctgttgatttttaaattattgttagataatatcctatttttcccccattcttataaataaaatgtcagtcctagcaggaatatttactaaacttttcttatgcatctcattcattcaactaacattttgtaagggacatctctgtgtaaggctttctagtctatggctaattccaaagtgaatatgaaaatgtatccttcacaactttcattcaaactgtataacaaatggcagatctgagattcaagcctatagtacaaccagtgaggccagattgtgtatttatccatcaaattttaattcttcagaattgagaaatttggttcagtaaacacatgttgaatatgcaaagaattcccatctaccttgtcaaagcaaggctttcctttattaagatatgtgtactctccaaataatttaaaacacaatataagtatgacttttgtggtaaactataagaatggttttcctttgaccctcttcttagattcatgatatagagacttggtttaattatattaatgattttttgtgagcttatataacaggttttctttttcttactgatatgagatgtttatagtgcgctgtgtggcttgtgaacccaagaatgctttatgtttttaatctgaagaacagccgtaatgttttctttatattaattttcacctctttagatttccatagaggacatttcaaagatttatgtttagcataaacacttcttttagttaattgtagaagtttaacactgactatatttacagccccgtaggtatagtttaaaatgtacatattaaacagaattgctctctggcatggtttaataaaatgatctgtgttattaattatacttttagcatgaatgtgctgtcatttactgaaatgtaaaaaaggaaaatcagtgataatgatgataatataaaacatcaattatattaagttagcaaattttgttcttttttcagtatttgatgatttatgcttaatgaggcaaggggttgaagtttatttcaatatgatgaaatttctagatttataattagtattatactcatatcaggtctttttaggtgaatcaaaacgtcaatatcaatgaatttaaagctatatccccaaactgaattaaggagttgtgtaaccatgttcacatttttaatactgattagcttcactcctagagtaagatactgacttacggtctacaaaatgagtatataatttgacttaatgaatatgagatcatcatttatttactatgtttatcaaaataaaattttgtagtttaaaaatacaggctaccaaaagctgaaaagaaataatctctgtggtatttaaaactacaaaaataataattatcactatttttcaattaatatttctccttttcttaatcagttttagggatacttaaagcatagttcgaaattagagttgacagtttcaaatacaaaccaaccaacagtgtaataaaatcaatacttacatttcccttgaggccactatttactgtttgctgcaccatttccttaatggaatggcagttatgtttgcagaaaccttctaagtaccattttatgttttaactaaaagcagctttcttgaagaagtatgataaagaaatttttgagttactattaaaaattgtcataaccagttagtggttcgtatgagtgcagagaaggcagccttcctttttattttatttttttgataaacactatcgcatttcatagggagtgatattttgctaataatggtaatatgtcttttatgtcttgattatgatggacattgacttaatatttaaacatctcgctatatttaaacaacttgctccatttaaataaacacatttacagttactaggttacatttcatttatggattgcttttggcagataactatagaaaaaattaaagaaagggaggaaaatagccatttatttatcttcacacagtaaaattattgtgtgattgacaaagtgatttactaatctcatttaatggcttagtgtttctattgtaagaattggtcagtaatttcactttttgttcattattttgtgttgttttttacaaaaaattgtttctgaaaaaatgacttcagaattacaatagactatcatttgtctgttccttgttttactgtactttatattgcatttgaaattgtctaatatgatattcttatgtgaatgctttaggtagatttgcatttttgaggatttaatcaaagttaaaaaatcaagttatttccatatttgcttttggttttgtattcaagataataacagcataagaattatttaaaatgaaagggtactttttacctcccagaggagtttatgtgtggtcaaactttgtttttattagtaattgtacaaactaaagtagagaagttgtgtgaacagaattcctggactttttagaagacacattttgaaacaggatattgaaaacaaagtccattggccaactcaagtctttttacatgatgatgtcagcaactatgtcctgtgataaagctgcagtattttcatgacaaagaaaaattcatatccacatctttaataaatggaggaaaaaaagcgttgttagtagattcatccgttcccatctaaacctttgtagcttctctcaaactgtaaatattgagagtaagatcagaataaatgtggtgttgcatcaaaattaatcgctaaagttattacttacggtgtcacatgtattccacattcaggcttttcacagaaagctttgaagagccctacaggaccaaccgaatgtaattgatacagaatcattgctacacaacagctgcagtaacaaggtgctgcagcttttactttaatctacctttctttctgagagtttattatgtttttgaatttattcttttgtagatctgggagctatcttttttatggaaattaatctttttagaagatttgtactctctttttcaaacactaatacattcattcaagtatcctattattcagatccagctggcttttatctggtgatatttacttcaaaaagccaagttaaatggtatcatagattaattctcagggcacagaaaagctttcttagagtaaaacatgatttggtaattacttgaaatatcataaaaaatcacagaaaatgtcaaaaatgtgttgtataatccatcataataagaaacttcaaaaagttgtttcactgaagatgtggtattccaagtccatcataagtttttatttcagtcaaatattatataacgtataagtttgtttgaggttttaacaaactatatcatgaattttagttttctgttgtttggtcacacaaagcagtgaaacttcaaaaggggcattatccactgctgtctcttacataaatcaaactggaaataagacacattttacaattcaatttaagatcccactgagacaataatgttgcaagctgtgcattttgcaaagtaatatagtaatgtctagtttgcatttttgaaaaaccaaattaatcacactttattgaatacgttggagcaaacctaaaattcatctattattaaaaacttgtgcaacaaacacaaactatattttatacataaaggacaaactcatttattcattaggataaaacacttggagtttgcattttgtaactatggaaagaaatgacatttgctattggggcttttttgaatttttaaaagcagtctatgtgtagcgacctgcttgaaactttattttagcatgttaaattgtaccaggttttaagctttccagataaaaatagaaatttaaccgaaaaactttgggctattaaaacaaaaatcattaaagtaagtgatataatgtgaagggacaactcatacaaatgaaaataatcacattgggtattattttacatgtgagaaacctataataatatgatgatttgatggctttgatgaggaagagaaaactcttcctgggcagaatgaaggctcatcatgctatttgattttttcaggctgaagataataagtactttctgcatgtatatatttttaggtatgcaattccctatagtattagatataaattattgtggtatcttttggaaattattgcctacacgatatattatatattgtcatttttgagaggtcagtattgaagaaagctggtgaatataagaattgtgaatagtgaagaatagtaataaatagtgtgtaatactgtttcaatgtcagagtattacactgttttcctatctgctgatgtgtataatattctgtttaataacagttatttgaagtgccgtgtgatatacactttgcaccaatagaaattgcaatattaaagcatattccccagatttaatttttctttaaaaaagattgaagcaaccttgttacatttcataaaccttactatttaatcctgaatttgggaggaatattccctttttagcatctccaactgtgtcactcagggagggtctaaaagttatctgttaacctgaatctaccaagtaccctcttgcttttctaataagaactccacattgttgactcagttattggtgagctggtaccccctgtcaagaaagggtaaattatatccctgtatgtgaaaccttccaaacatgatacagatagttttttcttaattaaaaaaatattaactgcagtataaaaggaactacagccagtaggtttagatatggagtagagtatgcagtaaccacttgtcctcacccaacataattgttttgtcatggctggctctgaaagccaatttgttcttcagtcatcttcttagaaaactctaatgatagagaacacaagatttttttttctattttatcaattttccagtggcatgaaatatgagattcaggaatcctgccctggtcatatcaatgtcaatgtggtggatgacagaactcaggatgattattcctgatgatgagtttcttctcctccttctgactatctgatacatcactttaatcatatctctcctctgcctaagatgatgaccaaactcatcatcctgacatctgagaactttcataatctggtcctagcctacctaattccttctgacttctcagactttcctaatatgtgttctctcctctagtcaattgaggtacccagctgtcatccagacgcaccgtttatgtatgtcttcgcctcactgcatggcccaggcaactctctgaactgggtgtgtgctgttgtgccgtggagaggacatggggccaaaaggcctgcaaacatcttccaaattcagctctttttccaaaaggctgtgcgaccttaagcacttaatttaatcactctgaacctcagcttcctttgctgtaaaatgagggtattagactttatggtgccatcctcagcaaagtctttaccttattgcatcattttgaaatatattttttttccaacacacatgcttacatgtgctcaaatacacacatgcacatgagaaaattctttttcatccttccataattggcatataatattactttatttatttgtttattttttcaacctccctgtagttttaatataaactccatgaggatataaagtttcatctgctttgtccattgctatctccccagtacttacaacagtgcctggcacaaaatagatgttcggtatatgctaaaaaaatgaatgaacaaatgatttcaatgtctattttgttctctaatattctatgattcaaatatatacagaaaaataaactgtaggttgtattacaaagtttaaatgcaatttcttgctccttggcctgtacaccatagcatgctggatatatatatatatttaaattatgttttctgctctatttctttgtttgctagtttatatgactgcataataatcttagtctgatcgtttctgttgtcttgcctccctaagatttccaatatgcagggttaacttaattttggcataaataagaacataaattgtttttcaaagccatcttatttctcatctaaaatttaaaattttattaatattaacctgaataaatgcacataattaaatgattttcaaaaaatattttttttgaaatattttttcaacagttcagtagagaactgtttcaatagttcaaacagttcagtagagatttgacacagttcaaaaattaagccaagttctattcttaaagtcttaatacttttgtgagttaattagatttaaaatggataaatatatttaaaacacccatcatagtaatttgcacacacaagtattaaaagacaagtcgtctttccattattgtttattggtatgtccataacacaattatgtttcttgtgaaatggcttaaagatacttacactaagcgtaaagtatactccagatgtttctttctgaaaagcaactcttcataggaagctcacagagcaaaatttcaaaatcaaagaagaaaacagtttttacacagatcattttaactaaaggaagtccttaggtatttaattcgttttgaaaaattttgttttagtctagtagctgaagtcttaagtggttgtttcatataagttattttaattaagagcaacatttgttgtaagtttaacaaggtgcatttacccaggcgacctcaagtcttaggccaggcttatctaaatgagagcatctgtatatgatgatcttaatattctctgatgtaatgatgtgagagaatgtgtgtggtagaacaggcaaaaagtaggaagtgtgcaatattttaacattggaggaaatattaaaattatttaagacagtttgagattacaaagaaaataacagattatagtaagtattttacaatggagaatattttttagaatcagataacgattcattgttaattaaaggccccctggatgatgatgattcttattattatttgagacagggtcttgctcagtcacccaggctggaatgcagcggcatggtcatggctcactgcagcctctgcctcccaggctcaagcaacgctcctgcctcccaagtagctgggactacagatgtataccaccatgtccggctaatttttgtattttttgtagagacggtttccccatgttgcccaggctgggcttgaactcctgagttcaggtgatctgcctacctctgcctcccaaagtgctgggattacagatgtaagccactgtgcctgaccatggagatacttatttttaataggtagatttctctcacactgaaagtatttaaaattcagtagctttattactattatttctagataacgataatttgaatacatgttatttttgtaagttgaggattttaaaaaatcctatttctttgaccattttagaaaagatgccatatttcatcattcattatttattttttaccaaggcatgtaccttcttaatattgatgttgggaaaaatttttgcaaaaaagaaacaaaaatgaatgtgactgatttagctaaatgccatcctgagttgttgtcttttctaaacttaaacctgtgtttagcactcgagtcagacattgaatcattgtgtaactttacctaggttcatacccccttatattcttcattggtcacattatggttacaataattaaattagatcatttttaaaataaaaagaataaaaatgtttaaattttactttatatttgcctatgaagattgatattttgagaaaataaatccttatttagaaacatagtttttaaccctctttcttattctaactctcattgtcatggcaatctacagaagagttttataaccatttattcttgggataaaaatgagtgcttgtattttccccaaattggagtataaaggtaaaaataaaattatctgtattgctgctgatcctaagtattctttccattgccagcagccaaaattttattggtccttttgaccttgaaaacctcctcttctgaatgcctatgaaaaactgatgaaaagtgcttcgaatagaatgtctttactatgtataatagaagctatggtcagaatgatttggtttcatataaacagtagctttcaacaagtctgccatctgcatgtaatctaccctataatataatattatttcaatggtccttcaaatatgctgaattcttttctgttatatgcagtacctctatttaaaggcagccatctccatgtttttaagatgaactttgtaattactggatatcctaactgattatcatattacaagttggactaatggcacattttgaaattattcttagttgtgtctatttggttttgtctttctttaggctgtctaccttaaatagtagttaggattgttaaatctttaaattcaatcataatgtgcattcattcattgttaattgagggcctaagatatgtcaggcattcatgtattcgtattgattatcttattaaaaagaatattttagcttagaagtaagtggagaaacttgaatattataaaaatgcattaatacaatcatttgtgctaagaatttattataatctgtgtaacttgtattaaactataggagtcacataccaatatttgcttattcttgctcagctcttcaggattaaaacattatgcaatttggtttatttgagacttattctatggtttatagtagaaatacacttttggtagcaatacctttattctttccatatctgcttaaagcatcatggcttaatctactatgtacaaattaatgacttccaaatcttcctcactgggcatctccttttcttccaaatttcagtcccatatttataattccctgttgtcaatctctgcatgactattaccgaaacatctcatattcaaccagtccaatattgaactgaattttatttatcgtaaaatctgatctttatatgggtgataaaaagcttggattgtgaattcagagttaggataatgaatataaaagcttaacaaaatgcccaacacattttaagtacatgatatatactagatgctatcatcatcattattgcctccttaataatgccactatacaacaattgttaatctagatgctgaattcatctttcatattttactcactttatctccatttatatctcaatagttactaagttccattaagcttatttccaaaatgttaaacatattaccattctttatcttctctatctttaattacagttaagaataataattagggctgggcgcggtggctcatgcccattatcccagcactttgggaagacgaggcggcagatcacgaggtcaggacttcgagaccagcctggcattgtgaaagcccgtctctactaaaatgcaaaaattagctgggcatggtggcgtgtgctgtagtctcgctactctggaggctgggcagaagaatcgcttgaacccaggaggcagaggttgcagtgagctgagattgcaccactgctctccagcctgggtaatagtgagattctgtataaaaaataataataacaataataattaggcaaatacatgttattatatgtgcatgtgcctctcctgcatatcataagctgctccataacaaaggctgtatctgaacgcttttattgccacaatgatacttaccagatgtaaatgtgagaattggtctggatttgaagctctcagctcaaaaactgattgaaagttagtcttaccttatttatttctgtggatacaatgatgagagaaaaaaaaaaaaagacacaggcttgaccacgtggaacttacattaagacaaacttttaaaatatttttcttaataacaatgggaaaaaaatgaagacccctaatcaggggagtgacagtgtaagatttgtaattaaaagtagtggtcctaaatttgattacagcagctgaggtaaaaacagacaaaatagagatgaataatagagatgaaatcaataggacatgaaaaaggagttgggcgctgctggtgcacaggaagagatgagcagataaagtggattcctaggttcctggcttataaaactcgccggtgatgtccttctttgaggctaaccaggtttaggaaggagataaattaatacttaaatccatacatataaaatatcaagacaattgccaaaacataccatctcacttgtgaaggttttatgctttttggaaaattcaatagcaattttcctcaagtgggaaaaatgttttcaatttcaacacaaataattgaaaactgataacattgtataaaaccatgaaaattaaaacttatttcaccttgccatgggcaacatttgtacatgagcataaaaacattaataatatatactttgacattgattaccccactaacaatctataaaatataactcaccattttatttaatgtgattataaatccatagggaaattacaatatccttagagaaagaatttctagttcattggtttacctaacagaagaatagtatggtgaggtaaagttagaaaaagtagaaattcattaacatggcaataagaaaggctaaaagatggaaagcaaaattagcatagatactttataccaaactgctttattttgaagaactgtatgaataagttttagatagcaaagtgtgtatgaacattgtgtggtcatttctacattgtcctttatctgtaatcaaattatacttaagttgtagaaattaaccagcttttttcagtctcatttccactgactagcaacatttggctcttgcttacaatcagcttatagtctgtatttacaagacacccaaatatgtagtcaatacaaatcaatctggctactaattttttcttatacaaaaatctatgtaactatttacccagtctgcatttctttgttttaccttggtgtgtggatctattttccctggttaacacttacagcatggtgctaatgagtccaaagaaaacaatggcatcaaaaaaccagtgttttctgatatagttatctctctcttctgcacatatagtattttaccttttatctttataattatgaccctacttcttttagtttgagttgcatcaaaactttctgaaatttactacgacataaggaaaaatacatgaagcattgttatttatatatagaaattcatttaaataaattttatgagttccaaaatgaaagctatttaaaattgaaaccattgtctattttcagcttcctaatgctatttttgtttttcataattatccagtttctcaggataaagaagccattgtttttagtaatgtctgcctgttcattaagtatcgtttcatcttacattagtcacttggatatcagatctgattttacggtttgtttcccgttctctttagttcaataatcattggccgtagtaaagaatattcagccaaaatttaaaaataagcagttctagtttccattaatttgtgtgtgctttgtacaacttcacttattgttactttcagcaccattgtggagtatatagggcaataccaatatcttaagtaggtgaagaaatttagaattaacaaagttttgatgagtccaagaacactaatagcatcagtattatgttataaacaatgcatacaaaataaatatatcaaaacagctctgcattcaaaagaaaacatcataggtaagataaaagtcccctggtatggcaagagtttcacattcctaattaactatatctgacattccagtaacacagggtaagatttagttagtgatagataactaaagaaaaatatctaattatttatgggaaagtaacatattttcctaaatgatatatttataggtaatggggcagttagaatttataacaacattatttttctctcaagaaaaaaataaattgatgtaagaatattaagccaagcagaattggttacatgaaagacaaccagttctttttttacccagaacctccaaatcaaacatgataaatgtgctgacctactctgcggacattattttgcaataccagttaggaggcacttgtggcattttctttgctaaaccactacacttaaaacaggaacattttaaactgtgtccctaattaattatatccctagaagatttcttcttttctcattttagtagtgtgataaagtcaaaccaaagcatcaggagatttcagtgtttttatatcctaaagtagatcaactgggattaaatagttattcaaaagaatacctaaagactatattacaataactttcatgaaaggactgtttccgcaactcatgcaaaatagtagcattactgctgacgttttatatcatttttttaatagagtgaacttaatccactaaaagataataacttgtttattctctcacctacctctgaagtaacagctgaacatctgtagcacctgtgactaatatttacttttatttagaagttttgttttcgttgttaagatggagttgacgtctttctaagtggtctccaatggtatggagtaaatgcctgctcttgccgtcattttcattgtaaacaaatcttgacaatgtcaggttcccgtcacaatctatcagtgtcactcaataagcagtggtgtgaccgttagtccctttgcgatttgcctcctttatcagggtcagcctgtgggaaaatcttaacaaatagttacatgtcacctaggtataaatgatagtaatacagtagtcaaatatatttttactattttaatgcaagtaatttaaaaggcatttatattttacagatcactttagttttgtgtttattttatgtgtcttctatctaaaatgcatagaaatactgtggacttctctttgggaacctgtttctcgttggatatatttaggaatgaaatgaacaaatacatgaatatgtataattatttggactaagactataattggtgccgtgcgtacacacactcaaaattgttattgtgtttttagtagagaaactaagaatatctttgtccaaaacatttttcattccctttcctacctaaaaattgtgcttccctttatttctgtttattctttccctttatttcagtttatttacaagaaccagttactaaaatttgatttataatatagccatatttgttattcattttcttgtgtatgtttatgtaacaggatattaaatacaatttttcctgtggtctccaacaagaacaaaaggtgtcaggtacccctcattttaaagaaagtaaaaaacaattgtgcttattatagcaactgaatcagcattgctgtcttaactatcactccagactccatgaacaaccaccttcttcctttctaagaatggaccacactcatttatgaacactcatttataaaatgggatttgaagagatcattctagtgaaaggacagcaactgacaggtatggctgtggtttagtaattcctctttgggcatgcttcctcactgagaaggtcaagggaggaaaattccaacagaattactcaaggattgcggatgtttccacctcgtttggtagctagatttctgcttaagtgtgaactgctgattgggagcaggggttggaggtggtggtaaagaactgaggagaagggagcaggctggagaaagtgggcatcagaacaagaggacttacaccagcaggaggaccttagtatcaagaggcaatgggagtttaaggagcttagacgatcatgaagctggaggagagtctactgtgagggacttgtgcagttaggaagttcctcagtaaggattcccttgaaggatcagacattaccaccatggaaatgtttagatttaggcctttaccacttggaagatgtcaatggcctaaaggagtagccacagaagttgtggtgcaggggaaatttaagcaggaaccatttaagcaagagacatttatcttattacccagaagaaggagaagaggaagacaggatggttgaaaagctgagctagcttctgtcttctagatacctagactctagaaatggctaatgctagtggggatggggaagcagagatgacagttaactagagtggatttattatactcaaaatctgctcaaggctcttaagggacagaatagggaaccttgacaaagcttttttgaaggcagtaattagaggaaaacgaaaaccattttatatttgtaacccatcatttctgactattcaataatctggtgcccttagagtagagatggctttcacaatttagggatatatttctgcatttaaaacctggtccatcttaaaagatgtatcataaaatgcaataaaaatatcaagtgagggtgagccaaggaaaatagtctgagcccatgaagactaagacattgcatcaaacttatttttcagaagctttgttttaatgttgtaatggggaggcactaagcggggagaggacctcccacacctactccttacatatttgaattttagttacactaaatcttgaaataaccttgcttgtcccatcttttacacagaagaaaatctaaacacacacagtcactctttatatataaattccatatatttaaatatgtagttattagtatattcttaatagcagttaagtcagttttttctgtttctgtcttcccctgccaaatgttagaaatttcttatatattgaatctgctgctgtttcttgcagtcttaatagtaaatatgaattttaaaggtatttatgtgtgtatatatgtttgtgtgttaagcatagtgcatatatactggtttatatcgtgctaatatattggcttaaaataaaattgtgaaaatatgcacttaataactgtgggcaggtcttgttctgaagtggcctattttcaattcttatttattcatgctaatagaggaaaaggatgttataaataatgcaaaaatcacttacagctgacttggttacatattgtatatttttcatcagacttagtttcttaattgtttgctctatttattacccaaatgagctaacatcatgagtatttaacaaatgatgattggcggagatggctagaagcattctatgtagtgagaaaatctaatatagtattagaaacttactagagaaaattcacatatgaatgcttgatatttacctgtgcacaagggactgatatctgtgacgcaaaaacagatgtgaaaatgggtagtgttttatctgtagttttcagagtgatttaatcagaattttaagataatattttgtaccttaataatgtgaaaaatagagttattgtgcatctctactgatatgagtgaaatttaaatatatttgcagaaataactatttcccatttatttatttatcgtggcagtaaggacttcaataaaagaggaaattagtttaagtgaacagaaaaaagtagattatagctgtaaatggagctcaaactgaatccaaaataatgaatgtatatttttccactccatattttagttaattatcttcaaatatgcactctactatgaaaatgtaatcgttacatttgttgaagattttaaatgaagtataaaatatagagaaaattacttattatttctaaatttccagggcaatttctatattaaaataatatttattccaaagcatgatttctatatcccgatagtcagttttaactgataacatacaaggtaaaatcaatgctgaatcataacatttgaccaaatcaaatcccacagattttgtgaattaagcctataataaaaaaattgcatgtactttgataaaggcaatgtaaagagcagatgtttaaaatgtgttataatcataatctcttgatatcatacatttgaaaaattcatctatttatagtgcttgcgtgtttgactagtacctagggataagtgtcaaaaaagttatgagaacagaagtaaggtgtataaatttgtgaatatgaaaagaacttttatatcacagtgtaggagcaagctggagaaatttcttttatgtaagtcatttctgtatgaagctataaacttttttttaaaccaaaagctgtcatggtttcttgtaaaataataaagataataaagatatccattttaattgattcttttcattgtttaataaaattgctttgtttgattgctgaagaatttgaattgagttttcattacccacttctgaacactttactctaagatccagacagtattgagctaattagtttgaatttatattgaaccttaactgtcttcatgaagtaaatggaaaaaaatcatggcagtaactaagtattcttcattaaaaactatgtcgtagagattttacaatgaggcttttagcagagctaaagcattaaattggagttttaccaactttgttgtttctatgcatattatatgaaaatatggtttctttttttaagaaataaaaaagtcatgagctgatagggatattacagaaatttcctctaagtggatagtttgtattttcaacagattcagttaaggaataaattaatgttaaattaatttaatttgggagcacatctaaattgaaatgatttataaacaccttccaaggagtgttctaataaggtatttcatgatctttttaaatctaaggcattgctaccaatattgaaatgcaagccctcagttgagtggcattgacatggagacataatgtatgtttctctttatttgaaaacaagtgatgtatttattcacacacacatgcatgcatatttaatttttgctttggcattatattctataaagtgatcttttgtgttctctgtacaatgtctaaccaagctggacgtttaatggcttcattttttggatttgctgtgtaatgaagttaggcactttatgtgatggctaggatgtcatttcatgcaagaataactttgcattctataaatattagtgtgtttcagttccaaggagtaattaattatctggttaatataatagagaccatttcatattaagctggatagccgaacagtattagactccaccactaggttaaatgttgccggaatatatatttttttaattttgagatcctatacaagaaatagaaaatcaaaaagaatgtgcagcttaggggaaatttacttacctcggcttatttccctagaaatcagttttccaactccaaatgtgatacattttttaaaaaactcattttaagttagtcattggaagatttggaataatattatatccaagtaatttatattcattccccacaggcagcagtgatggttcctgggataaggaaacactgccctcttccccatcccagggacctcaggcctctataacccacccccgcatgcctggagcacgtagccttccacttagtcatcctctcaaccatcttcagcagagccaccttctgccaaatggtacgatggcattctttagtattaaaaatcatagttttttttaaattgtatttatcagttggcaaaataggacataataaagagatatactatatttacatagctaattgggataagttaaagaaaaccctagtattttaagcaagattcagactgattataggaataatatagcaaagaattgaccatttgtattaaacacaggataagttaggaaatgataaaccagggcaccaaaccagatagctgtaagcctggtttccctgagtagtaagtgaaatttttgcatatgaagaggaaaaatattgtttctttgactaccattattagaaaacttttgactgtttcaatttttaatgatttatgtcctccagagcaatgatgatatatgtgcattttttataggactggaacttccttttatgatgatgccccaccctctaattcctgtcagcctacctccagcatctgtcaccatggcaatgagccagatgaaccacctcagcaccattgcaaatatggcagcagcagcacaagttcagagtcccccatccagagttgagacatcagttattaaggtaattctttttttatacaattattttggcatgttcatcttaagccaccatcccttaatccatttttcttattccataagtacatctgaactctaaaaagctaagtgatagtaaatagactattaaaaaaaatcacttgtagcaaatggccccaggggcacattacttaggcaggctagggttgctttaaattctctatatatctattaagatagagaaaaacataggacattaaatgttatagttcaaattgtgtgtgttcttacataggtagttgtgtgtatgcgtgtgtggtgttatgagcatttatgtgtggagaatcagaagaccagaagggataagttttgccacttcctagctctgtcaccttagacatgtaattcaatcttcctgattctagtaaatatctaataaaggcataatccagtgtggattatgttgtaaaaactaaatgaagtaataaaattggaagtttccataaattcaaaaatacactaaattaaaggtaacattattgttatataaacttcatatgtgcatatatacacaattccgtctcctctatccctgtgtatctgtgtgtgtatgtttgtgcatcgtatgtgttatatatgtaaatatgttttactttcatattattttaaaatgtgtacttaaatcaaaatattttaactgcgttgtctggctaaggagtaagaaataacaaaaaattaagaatagattattaatttttaaactaagtacaagatattttatgctgcatgatcattatttgacattacaattatcccatttttctgaatacaatacacttaaatttagggtatcctctggagcacatcttatataaacggccctgttcagatcacaaggtcagaagatcgagaccatcctggctaacatggtgaaaccccgtatctatcaaaaatacaaaaaattagccaggcgtggtggcgggcgcctgtagtcccagctactcggaagcctgaggcaggagaatggcgtgaacccaggaggcggagcttgcattgagctgagatcgtgccactgcactccagcctgggtgacacagtgagactccgtctcaaagaaaaaaaaaaaaaaaaaaaggccctgttactacttacatacaatgtggagtaacatacaaataggaattgttcttatattaatggctctaaaaacaaagatgtatcccagatgctttggtcattttctgtagtatcaataccagaggaaaaaataaccaaaagtctcacagaagacctggatcaactactcaaagatcaccacctcagagagcgccagtgagtgccacattgttatcagccaaggaactgataaaaagacctttgaaaactcttctctaagagggatattgttaccagattattcaataagcaagatatcaccgtattgttaaatttatgatgatgttaggtaataggtattattgagaattcagcactctgattgcctcactcattaaagttatctagaagaggagtttggcggagggaaaaacccatttaagtcttcccatcattgtagtcaatggctactttaagcaaatattacaaggtactaagtattaatgtatacgatgtgattattctcattaaaaaaatctggtcgtgattactataaagaatcatctcataatattaattatgtaatttttacttttaaaactggtaactaaaatctctcatttaggtaagatttacattaataaataaggcaaacatattacagaagagcagcttttagcagtttaaagtcataatgggtgtctaaattatggcctgtagctaatatttgcatgagggatggcttacatattcctgcatcaaaaagcctttatttatatcaggatacttgatttattttattttgcaatatacacatattttaaaaaatagttgtgctacttgttaattagaatacttaggggatctccttttaatacatacttggttgtcagagtttagataagtaggaggaagaagttgagtttcctctggaagaagtctatagaaaataattcaggactcaatgattgggaagtcagaaacattcctgtgttttcctagattaagtttaggaatggaaaggagggggatatatggagaaaggaagaaaatacacaaaaagagaagaaagtgaggtcgttttatgttttaagatatgtgccaacacctactaagtcatagagatatctcacttcttctcctgttgcaaatattttcagaaacttggttacatgcagattaaagggagttgtggattttgaaagtgttgatgtaaatggtaatagtagcagccaaatagggaacaatggctctaattgagaatgattacaaaaagtaaaatctgatagtttttattgccaacatcaaagtgaagttcaattggctgttgtggaagggctgaaaggcccattttttatcatggtgcccttattattttgtgagacaggccatttgtatagcttcgaatttgacactgacaggtaaagattattgaaagtaaacacattttaagaaaggcatgagacgattctaagcagttatagatgcttaaagacatccacataacctgataaaaatcaagtgagtgtcctcagagaataagggtgaggaataggtcctccaagaagttctaagtattagagaggagaagttaacaaatcaacctgtctaaatgtatatattggttgactgtatagaacaagaagagtttataaactcacctaatagatgttaattaagtttagttttggggaagtttttattttcctcaaagaaaacagctgactcctatgtcacctttaacagtattggacacgtggataactagaatatggactacacattggtttgtctgggaagattctattaataagtgtgaaagtctgttgcaagtgacgtgttaaatgtcatagaagattgagcctgtatgacggaattataaagcaactggagaaatagtctttaaacagaaaatagaactttgagagatgttctaaatgctggaatataccatttacattttttaagagtaatgacaagacttaaaattaaaactcaacctaaatgcaaatggcaataacaatttgtaggacaaaagagaagcaaaaatacagctttcagagttatatattttaaaaatattctttgtttagctgtttctatgaagtaaaggagctccaaaagttttttcattaacatatcaatgccagtacatgaaatggagcagggtctgaatccccaagctgccaacgttgggtgaaatctattctgctgctggttttcatggcctgtgagttaagaatggttttgcatttttaagtggttggaaaaaaataaaaagaaaaatatttcatgacacatgagaattatatgaaattcaaaatgtagtgttggtaaataaagttttttctggggacagagccatatctaaatttatgtaatgtctatggctattttcacatgcaaagacagagtggactaaaatacttgctgtttggccttttaccaaaaaagtttgtcgatacctgtgttagacctctgattatcccaaacccacatgaatctcagactatggaaaactgaagcagctcaaactaaactctcaaacacaatagaaccaagtagaaaaaaaaattaaaataattgagaatttagggttgaaagaattaaatgcactgaggaaaagaaaactagatagatgaagactttcccactatggcattgttatttgctttacatgcaagcgttcatgagagagtctgctaaagccttgaacttagactttctatggctggttgtattgagtataatcaagattattttgaggaggaaattgacatactctttagacaataataggtctaattgaaattcctagttgtgtggatatatgcacaatttcctctcctgtctctctctcgctaaatatctgtggggatatattaaataattataaactgtacctgtattaatttcttatgtgtcaatgatacccatatactttttctgtttagcattcatagaacataaagcaacttagacttgagatgttatgtaattcagcttcccccataatggagaaataattcccacatccttcttattcattttcatatatctaagcttttgtaggatgcctaatctattttcagcagatttaagagtgagaagtatattcattaatcaaattaaaatttgcatctcaatagcttctaccttaactttgttatattttatttgaagaaaaatgtctactaattcttctaggttctagccatttcaatatttaagccctctgttttagtgcctatagtgtttctgttttctaggccaattattctaatttgttctgactattcttcatctttttggttgccttctttttattgaagtcaccctctatcacaccatactctagaagtgaattgtgcaatgaagagacactagacatcaacctcaatttggacaataatctataaatgtagtcatagttccaaagattttgtttggtagttgaatgtctgactcagtacatttcatgcctttctgacataaaattctgttaagccagtttttcttcatcttttatttgtgttaggaatttttatttatccacattaagatttttagtttccattccattgatttagggtcttcagatactttggagtattaacatcccagactatcacattagctatttatgccacctttgtatcatttccaaattttaaaaggatgtattcctttattacgttaaacgactgagtaaaataaacaatataaatcaagagatcaatttctcttgtcattggagaattcctaataagttgaaatgttctattaattgattctcttaggtatcattcattatgtaacccaaaattctcttgaatgaatcaatatttttctcagtttttatttaataaattcacaatgttataaagattttgaaaagggcgtacttgctgaaatagaagtaatagtgaaaggaagaaacgcagcatattttagtgatttaaggcatgtgttctgaaaaaagactacttggatttgcatttcgactttatcacctccaaccagtgtgaccatagacaaattatttaatatatttgtattttatgtaataacagcactaccccattaggttgtcataaagattaaattactatttatttaatctttggaagtctttatataccaacattattttcttctcattactattttgttttctctccaagtatccaaaatcatttgtttaaaagtaagttctagaattttgcagggaatccctgtcaagcctgtgaaatatagtcatacttctatggtgagacctctgtctctctgactttctatttttttttgttctgctcattttacctaataaaaattttatacgcagctttattttaatcaggacttttgggtttgtagtgcatagtatgcaaagcagatttttaaatgcattttaagatttttttcagagataacatagaactgtttttgagaaatatgatgacattcaaattaccctacattgttggatacacatctttcttcttatgacacattacagttttctgaaaatagggaatatgacttaaattcgttaattttctttgctgatctgttatgtgtctctgtgtgtgtctgtgcatgtgtgtgtgtgagagagagactttgtgacattctcatttaaagaattaaacattgaaaaacgctgtttataattgtactcatactttaaagcaagttcttaaaatactgtattaggaaacaggatgttacttgcatgaagtttaaaatgtgaaaagattataaaaactacaaccagagtgacctaattcacaaagtagagtgaatcttagagcaatgtgacatcatatacttcatgttggtttttagttacagaatagtttattctttgtacaaacataaaaatctccaagtgtatgcagagcttttagacataaatttttttcacaaaaatttatttaattttacttggttttaaaaaataataagtatgttctctttaggtttatttgaatattgatattaaatatgaaaaaagatgttaacctaaaaaagaaagtattacaacacaaccaccactaatgaaacatctaggccttgaaatacatcacatgtttaaatgcttgattttataataatactaaaaaagaaactcattgttcacatttggagaatttggggggaactgatgtttttaaaggacaataaaggcttaaagataaatacatggaagggatcaagcatttttcctgccttttccataaaaactgatcctaagaataaccaaatgattcatgaggtaactttgtgatcatagaaaccttctagaaaataagtgtgtaggaaattacaagccctaatgaagtgatgaattgcgaccatgatcatcagtggtggctggcatcataaaaggcaaccaagcagacattatgctcattatagaagcttgcaacaccatctatgaagtagtcgtacccccacatcaacttgtaccaagcctccagaggtaactatgcaggaaactcaagggtcaaaggaacattgggatgaattagactcatcaagggaactgcagatgagaggctcatagtggtggtggtggcctgtaagaacatacatttgttccttactaagttaaacattgactttaaacatttaccatgcaggagagattgatgccagttaaaggcaatgctggtcaaatcagcacttacctttttttccttgctgttcttccttcatctctatatcccttggctgtagtaaagaaagaagtcctaccttttaattaagacgccagtattcattgtcagatggtgctgaattataattcctgagtcaagattttattttgctgcttaaagcaaatttatattatcaaatagcaacctaaaaagttacaaggctatgtgaattttcatacacacttgggaaaaatatagtcccctaccaccaatgagtaagttcaaaaagacaacaggagaataaagttaagttgtttcagattatattaagttgtttcacggggtcttgccagtttcatgtttagaaaacttgagtatttatggagttccataatcaaagtttttttttaaagctatgtaaatattatttggggcttcctcagctatggaatcttgatttgggctgcctggtcctcaactaggtgtaagcatgctaacatcattgactgtctcttaaaagtacttttaagcatttttctgaatacaggattccaattctgctatttgtcttctttgcacatttttccaaagcaaaggaatttgaacaccactcttagtgtcaatgatgttgcatttcactaacaacatttaccaggtgtgatatatgctccatggggacaataatttttgtcagttttgtttaattttatgtaaccagaacctagatcctgcctggtacatagtaagtgttcagtaaatactcattgaactaatgtatttgagcctgagttttcttaaagctgagaagttttggttatataaagtgctggtcaacttcatcaattttataaattaaaagttatatgaagataacatttaggctgggcacggtggctcacagctgtaatcccagcactttgggaggcctaggctggtggatcacttagaccagcctgaccgacatgctgaaaccccgtctcagctaacaatacaaaaaattaatcaagtttggtggcagacgcctgtaatcccagctactcagaggctgaggtaggagaattgcttgaaccagggaggtggaggttgcagtgagccgagattgtgccactgcactctagcctgggtgacagagcaagaccctgactcaaaaaaacaaacaacaacaacaaaaatttaatattacaaattgttttcccacttctatatcctgttcagttagagaatctctattgaaaaacaaaaaatgaagagaattaaaaggagagcaaaataaataaaaactaaatgaaataatcctttagagaaatgagttgtgattatacttaccctaagaaaatattttaatttgataaaatataatacatttttaaggtgcagagaggagaactgagataatgaaatttttaaaatgtttaatcacatgtgtgtagtactgaacattttacactgtttattttagaatttgagtatgttgtttttgaattctatttttgattctgaattatcctacacaccaaatacttcttgttcttcccagaggcaaaaatgcagcttttccttttttgtcctccggttactattagtttattagtatgaccttttttttttttttcagtgaaagagtgctcctcttaaattttcatttattattgtggcgagttttataaagatggaacattgcaaaagattgtgttttattgattggtaaagttgattcaggactataaaggagtgtgttgaagtattaaattaaatattcgttctctctgtcctgcttcagccccttattggacgttaaagggtattacacaaatgaaatgataaatccagtttacatagttttcttatagacattgaactgcttctttcttattatgtctgaataaaactcattatctattttgtttcagtaataattatgagattccctcctaagcaattctttattgtctccattattctccatcttatagaatactctggaaaggcaagcatataaatatgataaaagaattaagctgttgaaataaattaatttattgtgcaacaatgtattcaaatcttacttgctcaatggattttactttaatgaaattcttcaaagaacaatacattaggttccaaagattgaaattatacattaagtaaaatgactgaatatgttgtgtctcaatttatagaaagtttcaattgaatagttaagcttttaaatcataaacacttgcataaattaaaatattttcttcaaataacagtattaactgttgtttttgtatcctttgttcttgaacacaaaactacaattaaagcaaaaactaagttaaaggtaaattaaatactattattttacttatacatatttactgagctttattatgcttttaaaatgcattttacataaagatttcaatctaatttatttttacttagtataatatgcctttttaagagtattttggatgtgtaaatgagtaactgaacaattcatgaattaaagggatgatcacagacaactttgacatttaagtacattgactaataaagcatttttctacttatatgggaaatgttaaaataaacaaggaattattttaatggcataataattgtttccagagatttatgcattaaatatttaagcattttatgagttaaatatctcagaaaaattatattctcatgctttccattagcactaccaagaaatctattatgacaggaaaatcagacttgcaaaatcattttagagagactgatttatttcaagattgtactttatgtctgttcagccaaacatgcattaacataatgattaagaaaaatgttaaaatttattgatagataagcattgatgtgagtgaactttggaataaaatagaatggttaatttagaaaattctctttatacaaaaatatatcaatgcattttcttaaatacacaccatgtatttctgtgtaatccaagtgctaacagttagatgtattaggaattagctctaaagcttagacaaactatgcttctattagaatttcaagaaatcaagattagactttaagagtatatctctggacatgtatgcagttagctgcagtattgtttcttgatatatttatacaaattataaaggagttctacatatagccttataaatgcatcctctatgataagtgcgcaaatactccaaaaccatacacaactaaacttttgaattatggtgtggctaacacaagccaagattgtcttttgatttgtgattacaatgatttgatatgagaatattgccatttgaaacttctttatagtttagggtaattataattagaagacaggaagtaagttttggcatccagatgtgaagtttctgctcttttaagtcatatacatgtttgttttttaaaactgttggtcgtttgtttgccttagacgttttagaagcatacatgcttcattttgttagcttggaaaagtaactgataatatattcgttttccatgttacctgtgataaagatttcaaaatatcttaatctgcaaactgtaaagttggatgccatctttctgtagtatcctagcgtgtaacaaatgcatacatgttataaacgtctctgaacaagttagtttcaaattttaatatctgggatgtatgtttgtctttgtccccccttgttttctctctcctcttcccatctcttctctctgtctctttctctttctctctccctcccacttatttgcatatttgcagtattttaagtggaaaccccacataacttgagatggaaaatatattgtgtgttgcttacatttacctacatatcagttttgctatttgcataaaataaaacacttaattgttaaccccgatcaattaaggtaaagggctaatgctttttagtataatactaacaatacgtctgccttctgtgggagtttattgtcttttacagaagcctatcagcacatattagctctgtacaaaaactcttaaagttcaacaagttatcattacgacaagattgtaatacgcattgcaactttcgagattaaaatttaattgacctcttttttcttttcctttacaatattgttttgtcatgaagcttcttatagcgctttttttttttaattccatggaatatatgttaggaaaccattttatgacatggatttgggaaaagggcttggctattttttctggttattttcattttatttgtcagggtcttcaaaatgaagtctcagcatatctgttgaagatgtttattggcaatgtacatcattgaaaaattaaaagagtgtgacaaaagtacagctcaatcttggttccatattaaaatcatagggagagcttttaaaaagataccgaagtctgggtcccattttagacctagtgtattagatttctagggccactgtaacaaagaaccagaaactgggtaccttaaaaccacagaaatttattgtctctcattattggagtctagaagttcaaaatcaggagttcatgaggaccatgctccctttgagatactaggtagaatccttcgctttctatagcttctggtagcagctggcaatccttgccattccctggcttgaagctgcacaagtttaatctcttcctctatggtcacatgacattcttccctcctatcttcacatctacttgtaaggacacgactcacgtgggattaaaagccaccctaatccagtatgttctcatcttaactaattatgtctgcaaagactcagttttcaagtacattcatattgatagggaccaaaggttagggcttcaacagatctttttggggaacacaattaagccataatactcagtaaaccagaatctctgggagtgaaactcaagcataagcgcatttaagaacatgccaggtgattctgatgtgcagcaggatttcaaaccatcatggtgctaatggaatcactttgaccaaagatgagcacgatcatcattctcactggcagtacaaaacctggaacctcctatttgttttccgtattaagttaacattgacattttggaaacattagcctcctacaggccaattacattttagattttttttctctattttgtaattgcatattttctctctaataaggaataatgtactaattatttataagtacattatacatctacatactttatatagttttcttccacacttttaactatttattattacaaagacagttcatcaaggcctgtgtctgttaataactgagggtataaatattttgctgctcaaagtagaaaatgttcaccaatgggtaccttctttcttaatctgtaattccatttataatagctaattggagacatttatagaatctacttgcagatttgtctaatggagaatgtacagagcttagagagggaggtgtggagagagacaagactgttgacataaaatagagtatcaggaagcacagtaccaaatttccctgggacatgattgatatatatttcataaatgtgcccttaatacagttgtgtggttgaattgaagctaggtgtggtaggtactctgagaattatttaaaccaaagaaaattattccaatattaaataataatccatttccatgatgcctgaaaatgtgactgagtatgtccagagcagtactaggatggaatacctgttaaaaactcctctggtattattattatggtcagtcatgttgataatgtgtttattacatgatctttagatacttgcagaaataagggaatatatttaaagatttcttcaaaatgataaataatccttctttattctctgagatctttgttgtctaatgggttcttatttgtttatttttgggcgtcttcctagggcttactttttctccagagtggattgacattcgccattactgcagtcacgcttacctgtagaaccatagtttcatagaccatctttttctactttatttggcttgctcaagataaacatatcttttagtacagttaaatgctgatgaagtaaagtgtttattctctttacatttcttattgtattgagaaaaaacaacattcattaagtaaagatccgttgtatttaacatcttttctaccctccttccctctcttgctggtgcaggagcgtgttcctgatagcccctcacctgccccctctctggaggaggggagaaggcctggcagtcacccatcatcacatcgcagcagcagcgtgtccagctcccctgctcggactgagagctcttctgacagaatccgtaggtctcatacttctacttgtcaccattttaaactttattagggttcagctggattttctaatcaacatgccctcattccaaatagatctcagatggatcatgttctgaaactctgtagcaatagccatctctcaaaattatgtttcccagtttgcaatatcatgaggtatgatactacattaacaggtcctgatataaatttcctctctttgatgccacatataaagatttgagctatgaaacagagaaaataagtaaccgtttagattggtttctgaagtaaacacagccaattctcaaatatctagtgtcttggtacactgtttatggattattcaacatcattcctcaaatcctactctgccatttttgtaattcactgacttttaaattttatccttgtgttaatggagatatccacaaagagaaatcagttaaattcaaaatactaaacttaaaaagcatacatttctaagtcattcaggtggtcaatggattaaataatttgaaattagctaagtttgagaatttgaattagtaacaatcaataatgcatagtattgccatatattgttatttttaaaatttggaaagtagggctgtgtgttattttataatattttcacaatatttaatcttggtagttatggccaagaaaattaagaataaagttaaaatgccatccaattaacaagtgatttttgtgtctgtacaataatctcagattgttcttttgataaatgactatattaaaagagaataacttgtttgataaaacctatatatattgcttattcccagaatttagctattattttatgcaattatgtttatagcatacacttcatctaattgtacaaagtttatttaagttatttggttgtcgagaatattttcataataggaaagcattttctagaaagtcactttataggttataaaggaatgtatgcataaagtgaaaattgttgatctgggagctattgaagtggataatttaaagattaagttgaatgctgtgtaaataattataaataaaagatagtcaattattggcaattatatagttcaacataatactaaatatatatacttgctttggcctgccggaaacgtatttccttaattttgtaactttatatacaattttaaaacagttttcaaatgaaatatttactgtatatttttatggtatgttgacactagaatcagaaatttaatgataaatattggtttcattataagatattgtcattggaaaggtgctgtcctagagaaaaaaaaattggaacaaaatgaaaatgatggacagatgggggaagatttgaatgagttttgttatacattcatgttattttagtaatggtaatattcttttttcaatttttgatagaaacaaaggagacatttttgtatgcctgggataccataattgttgaaatggaaatacatccacatccacacacatacatatatatgtacatatatgtaacatattactttaaagtaattttagactaacagaaaattttcaaatataatgcaaatcattcttatgtgtttgtcatcctgatttacctcatcagtcaaccaatcaagttctctgaaagtgatatctcaatataggcataatgtcacctagtgcttctgtcatagatttaatacaactttatctcaaattcatcatcgtttatcttctagaaacaagagcattattttacataagagaaaaatgatcaaaatcaggaaaataacattattatagtactaaaatttgaactacagtttttatttaaattgcactggttttcccaccaatattttttaaagcaagatttttttttttttctagctgcaaaagccaatctatgatcacacactacaattagttgtcatattctcttagtattctttaatctggaacagttccttagtccattttgtctttcagtaactttttttttttttttttttagtacaggccatttattttgtagaatgtccctcagtttggatttttttatgtttccttttgattagtcttaggttatggatgtttggtgggaatcacacagctgtgatagtgtgtccttcttagtgaatcatttcaggaaacacacatttctacagtaccagcaataagtttatcactttcttaaggtggtgactactaggtttctctattgcaatattacttgttgttgatgtttacctttgtagatagtgagtgcctggtgagaaaaatatcttaagactatgcaaatattctgttcttagcaaacttccattcactagttttagaattatcccttgatcctgaaacaattattattaatggtgtttgccaaatagcaatttctactatattattcttatattttaaaaatttacattttccagataaaaatcttgttttatgcaaaataaaaataaagtgaggtgatgtcattttcaatattttctgcatattctgacaaattatcatgtttatcagttatcacagtgtttttagggatagattataaatttaaaggtagaccattatattaatattatagttactgttgagtccaagagagtttaattgacttattggaaccttgtgtgttatggtgtttttgtgttttgttttgtttgttttcttttgggccataatagcggtccatcagaatgggttgtccatgaaccagatgctgatgggcttatcaccaaatgtacttcctgggcccaaagagggagatttggccggtcatgacatgggacatgagtcaaaaaggatgcatattgaaaaaggtaatgtatgattatatattccttgtttttcccgattcaatagattttagaactagattttaatcacacaatgaagtctatctctacatcatgtaaaaaaaaagcatataaatgtttttaaaatccacaatattaagtacaaattaaacctattcattcaacaaaaaagagataagaatgaagacctgctgcacttctcttacacaacaggtaagttacaatttagttaccagtacattaaaaaaaaaagtcccaattgttatctctcagttcctaaagggtctgctatttgactttttcaataccttcagggtcactgtcattttacttagcatgatagaacaataacaatatagaaaggattattctgtcttcttttgaattaaaaaaacagtttacagaccaataaggaaacagaaatatattttatatgtcaatgtactactagttgtttcaagatataccaagaaacctcaggttctacatagctaaaaaagtttcttatattttgttaatgtcaatcaaacccatttttcacaggcaaaaatgtgtattttcatgccttatttgataattccatgaaaaaattaaaatattttagtcagcatattagaaatttattcttggagatgcaaatacgtattttcaaattgtaagtgttaaattgtggatataagaatcttcccacctattttttattttaacttaatattttcaaactttataaatatagataggataatttgcttatctttttttgacaaagccatcaaataatcagtgttgtgaataagggtatttctttggaaaacataaaaggggcacaattaatcagctgtcaacaaggaaaggaaacaaaattgggtatttaaataattgaacaggaataaatgcgtggagggagattaagttaaggaggggtaccttcttcccaccaaaaagactactcacaaaaaagtaaaaatgcttacataaaacatttccctttcagcataaaaatagctctgctaaatcccttagagagaaggagtatatttctacaaattagattatttgagctatggaatgtcagagagaaaacaataatctaggtactaacatgttaacatctaggcataattgagaaatagagacattaataaaatttttacattatttattgtgaaacttgatatcaagtgctatttatattaggcattcgaatgcagtgcacgactaggtcagatggtctctaaatttttaacttacatttttttcacaacctcttcattaacaataaagcagaatgtcatgtatattatccatcatatttattttgacctatacttttgatatttaataaaaaatccatgcatagcaatattgtaaaaattagtatagtggggctgggtgtactggctcacacctgtaatcccagcactttgggaggctgaggcaggcagatcacgaggtcaggagtcgagaccagcctgaccaatatggtgaaactccgtctctactaaaaatacaaaaattagatgggcgtgatggtgcgcacctgtagtcccaactactcgggaggctgaggcagaagaattgcttgaaccctggaggcagaggttgcagtaagccgagatcgcgccactgcactgcagcccgggtgacagagtgagagtccatgtcaaaaaaaaaaagaaaagataagaaaaattagtatactggtaaaacataaagtttcatcgaagactcaagttttaagtaatgatatttaaatataataattaaatgtatgggtgtcacaatcattctccactagggttgagctaaagggtaaagccctacagaaaattatttgagtcactcttttctcaattttcccttacatactatttaccaagtttaacttgggatgcataagaaggaagttaatttatgttatacaatgaatgtcaggatattagagctaaattctcttgcagcaccatggtggagaagggctaagagaaatatacaagtccagaggtggtagtgaagagaaaaatacaaaaggaatgaccagtactagaattggaataacaaatctcactagaatttttggtggagagctttgtgcaatgttatcctttgaattgacctatatttttcataactattcctttttcatatgtcaagatttcaatctctctacttatttattattattataattttgccactgtggagcatttgttgaaataatatactaggttgatgatctaggcatgttttaaagtatttgctttgttatttggaagttatttcttcattgctatccttccactactagaatgtactacatttgctttaaacagacaaggcagtctttgagtgcatactgatctgggctgaattactggaagtttctaagagatagacaagagttaaaacaactgtggagatcacatgctttaaggattaatagcaaggccaaaggtggaattttctgaccttcataaagcacatttatatgaaacacattagaacattctgaccacgaatatacataaaaacttactatatcactaatggtacttacatcaaggttttataaattgttttgctgtaagaacaaagtccttgaccatagcccgacagtttcccaatattttgacatatattttataatgacaaataaatttttaagattctccctagaaatgtgaaagtatcattgatttcaaatgtgtatatgtaatctcaaaattttaatagattttgatactattctagtaagcgttttgttatgtgatgcttttctcttgtgtgtaccttcttttatctagtttttaatatagtgaattaatagtaaatattcataggctttctaaattgatagaaactacgaaattaaaaattgttttctttcatgacaaaattttcatgggcctcataatatccctgtaactttcctacaactcatatctctatcaaacagataacttcatttagagatagatatttgtggagaaattaattgtatgttcgttacattttaggcttgaacctatatgtaatttgctgcctgccaactaaattattcaaaggacaattaattctttagaaaacactgattccaaaaatagatgccaaaatttatttgtattctgagaatcactgtggtctgaaatcttaagcatcagtaacttaaacattttatgttcttcttaatattaaatagctatgggctccattctattagcccaaaaaattaagtcaccattagttgaaggaccagaggttttaactattgagtaaattcattccattttaaaaataaagtatgctcacataaggttttgagcttagggagagtataattaaggcatatatatatgcatatatatatatatatactatatatataaaatacaaaaacaaatgttatatatataacaatataaaatacaaaaatataaaaatacaaaatgcaaaaacaaaatgttatatatatatataaaacaaaagttttaggcttgaatctatgtcagttcacatccatatatatgtatatatatatatgtatatatatatcccatatatgtatatatgtatatatatatggatatatgtctaatatacatatatggatatatgtctaatatacatatatggatatatgtctaatatacatatatggatatatgtctaatatacatatatggatatatgtctaatatacatatatggatatatgtctaatatacatatatggatatatgtctaatatacatatatggatatatgtctaatatacatatatggatatatgtctaatatacatatatggatatatgtctaatatacatatatggatatatgtctaatatacatatatggatatatgtctaatatacatatatggatatatgtctaatatacatatatggatatatgtctaatatacatatatggatatatgtctaatcccacatatatatatgggattacagcacccaccaccacgcctggctaatttttgtatttttagtagagacagggtttcacgatgttggccaggctggtctcgaactcctgatctcaggtgatccacctgccttggcttcccaaagtgctgagattacagggcgtgagctaccacacctggtctattagttctgtctctttctctctctctctctctctctctctctctctctctctctatatatatatatatatatatatatatatatatatatatatatatatatattcacatccatatatatatatatatatgcatgaaaactgtctttcagcttttccaaacatccggagtcctcaagagctttctgtgttttaaaacattgctgatcttttccctcattctaaatatagtggaataggctgtaataattgacatttgtggtatataaataggctcactgtttcttgatgctagagctctctgtttatcctccacacatttgtccactgacgctagtttacagtgttgctctctcatgcataatttgttttggtttttcttaaattgctgctactttcaacaaattttggagcacacttcttaccttgcctgtaactcaatatgtacatttttgttattatacgatttacctaatttttgattgatcaaaaattatatatatgatggagataagcctataatattaacttcttccaattatagaaaacttaagcatttatagttgtgactaactgttgcatacctaatttgtattattgtattttggtcttggattaagtagtccaatgtgatgtaatcaatgagtaaatatttactgaaagctagatatgtgaatgaaaagaaatgaaatgcaaatcaatcgctctctttctctgtctctccctttcctcgttaaaattatacagatttttttcttgatatgtcatttctcctacagataaggcttttctcttcatttgttttcataagaaataagaaaactttctttcactggtgacaacttcaggagaccaacatttcagaggcaggactaatctgagggaggcaggaaatccaggggatttgcttcaggccataaagcccttcttttgtgtcatattctgcttggtggggaatgctcaagatttccaatgctcaacatctccaatgcttaacatctttgtataaaaacttttcatactggtaatctaaagtgaaggacacagcactaaagacaataatgtagttagcaaactggccatatttggctttttgtctcttctttatattttagtcttagcatccaatcttatggaccattttcatacaaagcccttttgaaagaaaatcattatgtatcactttattcaagtttttggaaataatttttgaaatatatttttatttgtgcagttctcattgtttaaaaatcctaacttaaatcaagattgagtcttcaaaaatgcagcaacatgaatggaactacaggtcattgtgttacgtgagataagccaagtacagaaagacaataagtacatgttctcacatacatgggaactacaaaagcgtatctcatgaaggtagttagattgctggtttccagaggctgtttagaacagtggggaggagagaggattaatgggtccaaatacacagttagatagatgaaataagacctaatgttcaataaatcaatagggtgactatagtttacagcaatctattgtatatttcaaaatacctagaagaggataatttcaaatatttctagcataaagaaaagacaaatatttagggtgatggatatcccaattctactgatttggtctttaaaaattatgtaaatgtcttaaactatcgcatgtactcccaaaatatatacatctattatgtatcaataaaaaattaaattataagtaaacaaatggcttttttcttttaaattctaaatagatcttattcaaattaatcaatactaaatattacatacaacaactatatgggagcctgttagtatctcctgtgtctatatagaattgcatagactaaaagccttttttctttaaaattttctatattttgataatgttaacacatattatagggccatgagtattttcacttgtaaaattctctaacacgcaacttctcctttacttataccatctaaatatatcttttgttggcatatctcaaagtctcctgtaaaatattctattacctacctatgtaattttcctcctcagtttccatgcctcgaaaataagtgttgaacttagtgccatcacttttagttctgtgattataacactggacaacaacaactttctttggatcccagagctctttcttaagtagatagcagatttcatatgcaaagccgtagctcagcttgcttaagacactggttttgttattttatgaattatttctaggagcagagcttgtaataatatttcaatgacaattgaggaaaatacttactgtaagatattcataacagccctgtaaatgatgggcaattggtataaaatatagactataatatttatttactttttacccatgcgccttgatgaccatcacgtcacactgaactttcaagtttctcaaacatcctctgtcctttcctacatgatttctgtttctttccttacatgggatatgtatgccttcctatccactagtgttcagcccaaacttcttcagggcaggagctatgtcttctcaccttctttgtatacttagcacagggtctggcattagtgggtacaataaagttcttttcagagttaagtgagataatatatgtctggagtgcttgatgcatataaatatccaatggaaaccattactactatcaagttagctaatgagcaagtggtttgattatataaattggaaaatatacatgctttaaacctctgaattagaatattatctatttacaattcataataccacagttatcatgatttacatttgaccccaataggaaatttgaaattataatattgtagacagcactttgattacatatagctaaaatgtaatgtgtacagttttggaggaaaaaattgctaaattaactacattaatcagctattttatatgtcaatgattgtattaaaaataatctttatttatttaatacaatttcaatgaacctagaattcattcaataaatattttgaggagaaacatgtgtgtggctgtgtaaatcacaggtgatagtgggtattagatgtgaataggctacaagagagtgggttagaaatcaaacaagattccctctgatgggtaggaattctgtctttgaactactcacacatgccacttgtaaagtaaattactacagttttacataaaggttacatttcccaggaatttatcatacaagcaatatgaatattatatttaaaaatagagtcatttattggtgttgacaacctcagtggtttctcaattatatctccagtacatcttttctatgtttagattttagcaacttttttgtatatttggaaaactgaatcacgttaatatctactgataattttcatgcactatatgtcaaagagacaagagcagtcttataaatgctataaatttatacattatagtagttttacttgtgatcagatgagatgccttttccgcatttaaaaaaactattattccacttaatctgctttattttcttaatacggtaggtgtagaatgactcacttcctcactgtttaagagattgtttttatatagttgtgcaaatagataatatttttaaagcattaaacgtgaggtagagaacaaattactagtagactcacttatcagtttcacattgaaatttgcttcatttaatgatttatcaatcatcataaattcccttattttattgctttcatctaagatgtgattggataacttattatttggcttaatgaattggttatctctagtttttttttcctgcaatttactagcatattgctagtagatttctttcagttttgctagtttccagttgatagtttgcatagtctagtatggaagtgatctacagaggaaggttatgtgtattttttactatgtctatttgagtgagaatttaccccaaattgaaactttttctttttctttctttcttttttctttttggtgacagagtcttgctctgttgcccaggctggagtgcagtggcacaaaacatggttcacttcaacctccacctcctgggttcaagtgatccttgggtctcagcctcccgaatagctgggacttcaagcacacgccaccacaccggctactttttgtatttttagtggagatgaggttttaccatgtaggctaggctggtctcgaactcctgggctcaggcaatccacccacctcagcatcccaaagtgctgagattacaggcgtgagcaccacacagtgcctgaaagttaattttgagaatagtaattaacaatccaacattgtttagtggagctgaagatgtttttattttgcacattttaattttgtaaatggacagctatgtttttttcctcaaagaactataaaacacttgttttccttccttggttagacttatttagaaatgtacaaaaatgactgttaaaagttcagtgattctaacagctttcttattttttaatatgaaagaataacaaaattcaaattctgagtttccacagatatcagattactctgtatgatgatgtttttatggaataaaggaatagaatatctgaaactgcatatattttgacctaatagttttgaagtttctaacctgagatataaactgccacatggacatataataatttgacataataatgacttttctacaaacaaagttttttatcttatggctaatcatcactaaatacaaataaatttcttgtttgttcaaaatatcttccaagtatctaaatttttaaaaagagaaagtgttgccacttaaaaacatattttcaattttgcctaacactcacagtctacttttattaaaattttttataacctcacgtgtgcacacgtatacccctgcatacacacaaatgctttaacttctcttggtagatgatggagtgatcttgcattaaatgctgtattataggttaagaagcagagtaacacccctgttgtttcttgtgcttggagcagtttgaattcttccatcaaattggtaggatgatttaacacattcagtcagccttgtttgcagggcttgtaaataatagccaagcttaggtaaatcccaaagacactagaactaatttgaagtttatatgaaatagatcaaaagttaatatggaactagtggttattatgtttaaatgcatagtaacctgatgatattttgaaggtattttaaaggagatattgcccacctgctatagaaaactgggtagtgtttttctttgacttttccttgcttactaccacttaatcttgtccttttgacaaattattcctagagaggtatgtgataacttctgtgtataacagttttgtcccagtagaagctgcattttagattttctttaaaattttacattactattgttgctagtatcttatgctacagtttcagaatattaaacaagtacaattgttttaactactgtgaaattgacagatgaagctgaaaaccaaaagcacctttcatgggattttaaacaccattttcctccatatgccatcccaattattatttagatattacattcctaatttactgttaaggttgattagaattcaagcctctcaaaagcatgcaccaaaggtcttgggctgtggaaaacatttttataaaataatccattaatgcagaggagtgcaactaaattagttagcaatttgctgagcatgaattaatgaacagagcttcttccagctcccagagttgtaattttcataataacctcagacctttatttggcaggttgtttagttttttcgtttgaaggttttcattagtctaatgaggactgtgcaagggcgagcagtcagcacaatttacatggggaagctatcataataaatgaagcaatttgaataacacgcaagggtttatgcaacaagataagaagagattgtagagcgagatttagaggtaaccaatacattagaccaactaataactgaagtaatcccaataaaaggcttaagtgaaaggaatgaaattaatgatatatacaaagttgtaatgatatgatacatgattcattagattaataaaataagtattcaattgtttttagtgcttttggtctaagctttgtttatatcagacattttaattaggattgttctctagatcactttgcttagttaacttttagaccatagctgaggtttttaatgatattttttccttcttatttaatctttatagccttgatagttcattgaattaattataagcaatatattgtgtatagaaatgctttttaaaagtaattgcatatagctctacctaagtggtgattaaactttaagaatgaatgctcaatatgtttctaaattcttaaaaacaactgcttttgcttctactccaagcaagtaaagtacccttatgttttaatgttctataatttcatatcaaaatagtaataactaagtattattttattggtatatttcaggaggagccatttattaaatacattattagaaatttattatatccaatgtaaatctttaagatacaagttaaaaaatttactttaaaaaagccataaattaattttcttctttatatatccctcttttgaaaaatgtaatctggtgcacaagtgcttgagaattatacttttgtgaaggtaaatcagtctgacaatcctgtgtgcttttacgaagctgtgatctgaggaaacagttgataggatgatttaaaaaaattttattgcaagcaatataaactttagaaagctgatctgtttgacatatggagccaaattactttaagtaaaatgtaattttctacataaaaatgtatcagccttcactggatcactacctaaagggaattccccttctactcagatatctgtataagtggccaaaattgatggatatttatgaaggctttgccattctgtgctcttcttctaagtttggaattactgcatgcctctctgccttgatttcaaatcacagcttcttggatgtagaaaatttaatagataattatcttcccttatgttaatgaagggaacaagttgtttagtcttcatttgtgaatatgttaaagttatgttaggatacttttaaaaaatcatgatggctatatatttcaaacttgtgattacatttgtctttatggttcttcatttaaaagacagcacaaatgaattattttgtggactatattttgttaaaaatttttcaataaaaaatactttcagaagatgagacaatcattaattagttgaatgtttcacaggttcatcccttcctttccttccttcctccctcccttccttccttcctttcctccctctctccctccctccttccctcccttcttccttcctttcttcttttcttctttctttctatctttatttaaaaatcgtgataactatgagatactttgaggttactaatgaagcatgaaaataagtatataatgcttttatactttcttcaatttgctatatattgaccttattatttatcatgattgttattatttattatccattccataataacacaagtaatctattatggaaaaatcttgaattcacaaaatagttttatattcgtctaagagatgactatcactggaagcactctagcatgagggtaagaaaatatcctcgggattagacttctctatttaagtcctggttaaaatttcgaacttgggaaattagcgaatgtccgtgaccttcagtttcttcatcggtaaaaattcagtttgtagtacttgaaaaaagcaagtttgtttttataaaaattagcaaaactgttccatctgtatggagcactgtatacgtgttgtgccatatcactcagggtcctatcagaaaacagacagctcatagaagtaagataattcaaggtgtaggtacagaggatgatgcagtaatctagggcttagtagaagccaggctgtcacattctggtgctccatctgatctgcttgctgggttgtttaattaagtaatctatccataggacttggattcatcctaaagtcacacagatcagagaggaaggcagagagggtggacagtgaatctggagggccctgataagatttgtaattcaccaggttgcaagttccatgaatatgtggtggggtctatattatttacaactggatcttcagtgtctgtcacaaagactatcatactgcagtgtgttgcataaaagagaatgatttatctgttcaattatcatttaatataagtgatagcatttagaacaatacaattccaggaaacatttgtgaaaggacatagggaagttttgcagtcataatctcatacatttaagtaaaatcacagtaaatgatttcttaacagcattatttttttaagtgagcaattttctctattaatttattcattcagaaatttgttattacctgctatgtggtaagcaccactgtgcttgttgctaaaaagttagagatgaatgttaaacaaaaggacgtaggacattgttgtattttcaaaccatactgagaagtttttgaataaaatcaatgataatgaagactaaacccatatataggagtttatctaaactataacctctattcaaagtagtcatgtgtctcatggctttgtttttcttttacattttactggcaataaggaatacgcaggaagatttccattctctctctgccacacctacccaatagatatagttctttctacacctatggcttgtttgagaattgtcataggcagttgagtgctttagtggtaaggtgggatgattctagagaaagatatgtggtaaatcactatcgtattaagagagaaggtgtggttcttcttgggaaatcttagtggaaatagcctatttaaacctatggctgaggataaaatgcctttctgagttttgctatagttgtgtgctttagtggtaaggtgggacaattctagagaaagatatgtggtaaatcactctcgtactaggagagaaggtgtggttcttcttggggaatcttagcagaagtagtctatttaaatctacggctaaggatcaagtgcctttcttagtttcgctattatttacagatgggacagagactacgcatgacctatgtcataaattaagtattgtaatcaaggggaattttttggagatgaatggtgctacattctccatatcagtattgtcccccttatatctagaaaaatatccaaatcaaggcagatggggagtttaagcaatatatctacttacctcacaagatttcagttagattccctatgcatctcttagaaaagtacttggcccatggtatctgatcaagcatgttagttctcattgtctactgagaaataaatcagaattttaacaatgtctctctttaatcatagtaatagaaacattatgcgaatcaagagttttttgatgttttttcctctgaattgaaatgtattcatttgttcttgtagagtttattatttgttttaatcatctaaatatcttgatttttcagttcatatcatccttactaggattcaacttgattttacgaaaaacactggattaaatatgcataaaagactccaatgtgggatgtgtgctgattccagtgtatcctccagacattactgagaccaaaagtgatgcaattacattttccttttgttgcttttgcatttcttgtagtgaacctaagtccttcagatcccaataaacatacaacctaaattcttcacataccataaacacagaccttgttgtttcctgacttaaatccagttttcaaacttaggcagtgggtgaaaggagagagaagtctatgccaataatattggaaaatctcttttatgccattaatttcagttcctcaaggatcttcaatctttcctttcatgaatgtattttattttgctgtgatctttgttagactaagagctttcatagacttggaataatttctgatagtaaaatagctgagcttttaatctcctgaaaatgctcacttattgtttaaattgaatattacttttggcatcaaatagccaaagttctcagcttccttatatagaggtagactggcttataagttcttattttctctataacatgtggatggtacagtgagaaactttgaagttagactttagattagagtttatatattttctttgcaggaaaatttggcttccaataaaattcatatatgaaacactcatgtattttcagtgttctggaaatcatggcagtggtttaagattaaacagacttttctcattgttttagacaagccaaagaggagagagatttatttattgtggaaaaattttaaaatagaaatttagaataatgataatgacattattgatatttaaaagtcagctatcgacacatgtatttttctctatcaattctttatagctaataatttaaagtttttaccatgaaatgaagaaacagcctgtatgataataactcagatgattaaggaataagttatattttcatattgtgatgtaataagtttatctgaaccacaatgtactttttatacctgatgtacaactttgaactttgttttttattttatttttcaagtatgtatgtatgtatctatgtatgtatttatttatttatttgagacggagtttcgctcgtttcccaggctggagtgcaatggcgcaatctcagctcactgcaacctccacctcctgggttcaagagattctcctccctcagcctactaagtagctgggattacaggtgcccactgccatgcccagctaattttttagtatttttaatagtgaaggagtttcaccatgttggtcaggctggtctcgaactcctgacctcaggtgatctgcctgtcttggcttctcaaagtgctgggattacaggagtgagccatcgtacccggcctgaaatttgtgaagatgaaaaaaaaaaaaaaaaaaaaaaactgggcaaatatcagtgacttttccacaaatgtcaataattttttaaaaaggacagcaagctaaaggatgttaaatgtttaaaaagctccatagaattctactgcaactcatttttagaacccttaaaattaatataattgaaataaattgcaaagcaaatttcacagggtattctttttctttaataacaagaatttaacccttaacaccatgtaaaaatgtcagtgttttcatttgattatggcagacttctcttttctgacaacaaatgattcatgtgatattatcaataaaaatgtaaaatgccatataaatgaacttatatatggaaaatgtaacctatagaataagatatgtatacaaatcgcaagtccagtgtgcttcttgtaaagaaaaagttttattcagatcttagagtcaagcaatgaatttatttctttaattgatgtttttataattgatacttttattgaaggtgtttcatagtttatttgcataattaaatattaaggcaaactatgccagtttgttttataatcatgatcattatgtgaaataagctcaaacatacaataaagtttaaaagcccttacaaaagacatttcaggaaactataaaaatacttctttgagtaactgatactcattgtcaaggaagcaatatttctttggtgttggttagtaaatctcttgcacctagttgtaaagtattctgaagtaaaatttctatagaaccataaagaatcaggttttttaaaaaataaaattacatatgaacttcattatccataaggaatagcatcataatttgcacttattacttatgaaaatatttctaggatggtaacgtaattcattattacataatatttatttctctcctacttgagaaaaagtgctatgtaacatgataatctaaatttaacaatacataaaataaaaaacatagcatttcctttataataggcatattaataggacaagtatatgtgttaaggaaagggtttatgggttaatagataaacaatcatatatttttatgttggtgatcatttaatcagtgactttaaaatttctttccattttaatttaggcaatattatagaagttgaagttgagtttgttcaatgtgatatttttgtcatagactaaataccctaagtcatgagagttacataaattaagataaaacaaaaacctacaggttgctgtaatgttcagagctctataaggtttcaaaatgatctttactccattgtaagaattatgatgtcatatggaatgaaagctccataaaaaatctggattttttgatatgtagtatcagtttcatttattaatgatagttatggtgatatatgattctgtgataacccacatataatatccatcctaagaatgacatgaccaaaggcatttgtaattatatttacttctgaaagattatggtttatagttaaaacaaaagaggcatcctgtcattttctaaacccgttaaatgtgacagaatctatttttctgccaacttgtgaggaccaggcagagagcaaatttgctgtggtcagctaagtgtaaccactgagcaggaaagtgaatttaataatgcattattgttcttcactgaaggtgaactgttacagtgcctttgttatagcagactttgcctctgcttaggtttccagatgctgtgtagattacctgattaaaatctctaatgcatgataaaatgtaccaggtatacttttatattaacagaaatgcatccattttagggccataatactgaatctaattggaaacattttccaattatattatctagtgaatttatattataaataaatatgatatacaatatagaataaatgacatggaagcctaaattcataaagtttatctcatgccaatgatagatcattttattgatactgaaataaaatttaccatatttttgatgcaattaagaatatgatcttttaaatcatctttattttgaatgttattttaaaacaaagtaaaaaatacaagatactctttaaaatacaaccagttctttcatgaccgcattctttgtattgcccttccttttccagttccatcttttttgatattttctcttacaaatacattgatcaaccatagtactttcataaaagttttagtgctgattgagttgaaatgacaggaaataaataaagcttggtgtaatttactttctctattttacccaaatttaattcactaaaaaataaaatatgtgtaaaatagcatcttaagagaattagccagaaatacaaactttatttaggaaagcagaaatcctcggggaatttgtgcacattgattccttttttactgcaagtttttatattgattatagttcctatcagtaacattttcagagagtttatggatatattgcagattgtgggcttctgttaaccactggtattataggctcatggttgataatcaaacagttaattttatagttaattctgacaggtttctagaaagtctttcgaaggaaagattttctgtagtccacaactgaaagggtgcacacaacctaatctttggttgtcattgctgaactttatggttaagaggcaaagaaaagcatttttctgaatatcaagagcacccatcaatgaatatcactacgggccatagaacatgcaagttcaagagacagaagcaaaacaggagttgacaaaaaatagtaacagctagacccggtgtgagagtgtttttatacaacagtgaatgagaaaatgattttcactatttcttgcctcttaacaaatagagctgtgtgtatatggcagaaccataacaatttcagctgttatacatttgcattttgaatatttagacattaaacatttaaatctcattcaaaagattaaaaaaataaaatataaggaactgtgcaacatcgaggaatgaaagatgacttttatgtgataaacataaatatccaataactgcctaaaataaactctgaaattaccatgttgacaatgttatttcctctttttaaaaggacaagaaatatgaaacgaaattgaaatgcaacaaatacatgttttaacctgaccctgaatcttgtgtttatttttgttttaaataaaatctagagctccgtaggtaagataggtgccagcatttgaaactgcagtcatttttaaactgagtatgtttttatttttaaactaaatgtactatgctgtttgcatttcctaaaaatatccagaaactctggtagtttgttgttcagtgctcccctggagaattcatgtgaaggtctaaatattttatactgttgattttattaaaatgtgaagatccattttgtgaccgtgtaaatggaatgtcagtgtttcccttcgaagttcacattcccttgcctgtgttctgcatattccttttccttgctcagaattcttatataggtaaggaagaccttccaaggtttcttttgccacgcttgcttctccaaacactacaataaaatcattttgatgaagtaattgtgttttttttttttgaggaaaacaaaacatcagaaacactcccattatagaaccactagttgggattatctaccctaatgtatcttctttgtaatactcatgtatcacctctgtaatcaaatgacgaaattgaagatggcactgaacatttcattctatgattgaagtaattagatttttaaccttagtattatttgaatcggttccattttctagccttgagaaataatcaatgtggaatacttaaaagagcagtggcctagtgtggggcattgagttttaaaggtcaaaaacaatagtgtaatgtgagatgcagtttatgagtgattgtgtttgctggtctagagaagtagaaaagggttcatcgaaaattcagaagctagcatatctgatgcataaaatgagttggatttttgtgggtgatatttaaactcatagagaaaatatctacatggctcatgtatttatgatttcagtagaaagaaccttatgaaaaaatacaacaaatatagttttacatttttatgtttgtctagtaaacagaaaatattcattgagcagctattctggatcaagctagataattccaactagataattggaaatacagacaacaaggcacctcatggagtacaatttttaatggagaagacaaatttgagacaaaattgaagtttagtgtgataaatctaaaaactacaatattttcaagatgggattgagaaatgactaatcatgaaggagcctttgaagactttatttattctctctatggaactctaacattgttatcatatagacattcctgaaatttctttgcttttccctacttctgccttttttcccttcaattattcattgaggtctgaggaccaggcactgttctagctgctggaagcaagatgatcaacaaatcccctgctctcataaaatttatattcttatcaaagatatcagcaataagcaagtaaatgataaacacagaaacgaacatatgaacttatattagttggtgttttgtgtatgacagataagagactgggaaatgtgatagtagctagggtaggctttcatacataggatggcaccaagaggcttctctgggcaacatttgaactgcggctgaatgataacgcaaaggcagtcatggcaagttctggtgcagtggagctggggagacattttaggcaaagagaccagcaggctcaaagccctcaagcaggatgaaactggcatgaatcctcttggccagagcataaagattaaagcagacacatggtaagatgaattcagggaggtagggaagtgatcagagcctggagatgtttgcattctttggtaagaagtttgtattttatgagtatcttttgaggattttaaccagaggaatgacaggattctaattgatttttgcattgaaaatatataatggtgtgcggagctataattaaataataaactaattaagaggctattaaagacctctaggtgagaaatgatggtgactttgactagggtgttggcaattaaagtggagagaaatggattgattgaagtggtgttgagcggatttcttgaggaatttgataatggggaaaggatgatagaaagagaaagctcaagagtgtctcctacattgaggtttgcatgctttgtgaagtctatccttgtcaaccaccttcaacccaccattcagcttagtgccccacacagaataaacactccaagtttttgttgaatgaatgcatgtcataatatttattgaagttgatctgaggaatgaaacttggcacataatttccataaatgtagaatccttggatttgcagccactgggcaacagatgcaatcaaggcataaggaaaaaatgcaattattattgagacagtctgtttcttctcattattatgctctgtctcttagagcacactgcctccaggtccgtaatctcctaagtatttactattagccctagggtttgaatagcaaggatgtgtcaagaactttcactagatatgagatttcagcattccatagactaacactttaaccaaagtatctctacctagatctttgggataaaattgcgcttgagaaagatttctcctgataaaactttttgaaagcaattattttgagtgtaaattttagttgttttgaattttgatgtttctgaatacatttatcaataagatacagttatttaaattagatttaattgttctaatttcttatttcaagagatgataaatttagctggatcagtattgttaaatttttgactagaataaagtttaggaggaacaaatcaatacatttctcttaatcatttactatcaaaatgaaataaaagtaaatagttttatcaaataaaacaaatatgagaattaatcatttaaagatagtaataccgtaattattatgtttaaccaatttctacgtcaagtttggtgggaaattttcagtcattattatccaaataaactactctatgtacttaagtgcatgtttttactttgatttagtcaacttggaagacaatgttaaactattgttcaaaacatttttaaaaaaaatcatataagatagcttattgaatcttcaaaatatttatacaaatatttccagttgttatagagcttgttctaggtattctgggaaattatcaaaaagatataaaatcaagattggtaaataaactatgcgcacgaacaagctaagtaatacaagaggacactataaatatttgtatggaaaataaattcagcatcaaagcagtgtcttggggggaaaaaaatgcgcctgactttatttaaaccttttttaaccctttgaactgctgaaggaatttaccatatttgttaattaaggaatatttaccatgttatttttatatgagatttgctaagtctgtctccttatttcatgaccaaatttgtgataatcacaatcactctttatttttgagttcttggttaacaataacattccaaattttaaatgaaaatcttaatgatacattatttggaaattcttatacatgctaaaagccagttgaacattttaaattttgtaaagaaaattcacatgatatacaccgattagtatgtctaataacatctaaaaatgcaacatctataaatatgcttctttaaggtttttctaataccaaaccttaatcagtattatacattataaattgtataatacagtgttaatatactgataatggtaagcttggttttctaagtattatttttctatcttaaaaattaaataaattatgtaaaacatttaatatttattaaaatagttttatgaaacatagaaaaactctgatttgttaagttattattctgggagttaaagagtcagatagtcactagatctttttccacgtgcttttagcttgttcctcacctctttcatatgaaaataaaattacattcttctaaaatttcagcagcactatttgcatagaacactcatttagctcttataaacaaggacaaaattaagtgcacagttttacttgaatgggtacatttagtgataaatttcaacttgtttttcgttcaatcatccatgcaccactaaagatgagttataactttattatttttatgatattgtatgacaatggaatttagttattattgttttaaattttacctcttattcatttttttctccacacatcagaagagttcttaatgtaagtattaaagatttaaaattatattttatatttaattttaaaatctagatactgtttcttcatttcttttccttccccatagttacaattgctcactttgggcatcatcaaaacattgtctactcttaaaaactaaaagttctggtgttgatgttttgcttaattttagaagtagaacttcaatatgatcaatatgtttttacttttcataatggtttatgtagatattattaaagtaataaatatttctcaatgatttcaaatcattaacaaagtaaatatgcaattaaattaacgagcataatttaatattaaagacaattaactattttttaaatatttttgtccttttattgttgctattgatttttgaatttttccttcgatttatgtatttcatgtttagtataccttcagtctatcaagaaagtaaacaataataaaaatgtaaatcaacataaaaaatattgcctcacattgagagaacatttcaaagactttttatcagttgttcattttcccctgtcagatgttaaaatcttttactacccctcatattgcacagaaatgctggtctactgatagtgtcttcttgtagctaagctgtgaagaagtcaaaatttcattttgtaaaggcagttatcacgaggagtgctgcaggcctaggttattggtccttatttagccgacccagagataagatgtctaatttcctgaccaagcttctcatgtgtttatgtaagtctttctctctctgtgccactggggtggggtggagaaaaagagaaatgacccttgttgaaataccaataaaaaatacatactgatgctattcctcagtactcttttattctggatacctagctatcaatacagtaaagtgtgtgtgtgtgtgtgtgtgtttgtgtgtgtgacacacactcagagagagagagagaatgagacagagagatagacagagagagacagagacaaagagaaagcaagaaaggaagacctgataagtacattcccatagagatttcattgaactaaagagagagtgaaaatatcaagctgttttataggaaaatgtagaaaaggtactgaagaaaagacccttaaataatttgatgagattattttgaatggcatattagaatttaatataggccggaaataactgtggtcatgactttaaagtaatatcaacatcatagtatttaagcctaatttaagccactgaggaaaattaggcaaataagtaacagccaagcttggagttttgtcctaaaagatataaatttcactgtcacgtttcctttccttttctcatgctgatctttagattgaaaatacgaggaattacttatgaaacttttttatttccttgaaagctgacttccaaatgaaaaatagggaaatggagaaaatatttctctaaaaaaatttctctaattgcaattaatggaaaatataggaaaaaaatcttatacgctttgaagagcttttctctgactcacagtcttcattgtcttttcctaataattttttaaaagaatgttattgatatctctcctgatttgttttttttttaagtcttaaaacaattttcctgaccagttattctaaaagtaaagtggtttatcggtacaagcaggtaaaacctgaatagttgtctctaatcagataaaaatatctcctacatgtttcttggattcaattgtgattaacttttctcagtataatgtatcccataattagaaaaatatattcttatcattatttaaagttaggcctagccttgtatatttattaactagaaaattttatttgattcataaaaataaaactaacagtgaaatatatttatatatgagttgatataatcacaactaccccaattattttaagatgctaaaacaaatgcaaaccagaagaggttattaaagctgtagtcatagattatttagatagaagcatttttttcctaaatctatttccctaaaggggaagggagctgaagtatactggctgaaagcctactaggtaccaggatcctttaaacatgtgaacacattagctaggtttacgcctttcagttctccccaatatctctttcttcatcagtagcatacatttttcataattaacataattaaggtatatatttattcatttttattttcataaatattttccagttacttttactttggtattggagagccctttctaaattccttttggtggaacgggagttagtaaatagtaaatttccaaaagtgtcaaatgaatatctgaaaaattaaaatgcatttaatttcataaatatttctctttactcttttttccctctccctagtatttctgaaattcaactaaattcttaaacagataggaaatatatctttttcttaaactctcttgaaaggttagattttaacaatatagtctaataatgcaatgtatttgaaaaccccaaagaactattgccagctaaaattatcttttcaaaatgatggaaatctaaggatgtaacaagtgtccataatggaaccaaggactttatcattatttggttatcagagaccttagaaaaagtagttcactaatatcattagcttatattctgctttccaaatgaaagagagagtgaacattgtaatagtaagaagttattgaatgcctaatatgcacaagacacagtatagtatgcacatatatatatacacacatacatgcacatgtatatacacacacatatatatgtgattattcctcaaaagaatgatataaaaatataatatttattttaagaatgaggtctaaatactcaatgtgatcgaacaggcattccaaagaggtctttgacctgtgagcctgtgtttttcattttgctaccctgtttagagaacaacacttccgaaaacaaacagaaaatgacaacattaataacaaaattactcagagcccttaaaaatcttacttctatttcccagtaatgtcatctccacagatgtgtattgggaactgatttttttatctattcctttgcttgcatgttttaatatttcaggagttaacaggccaagtcctatttctgagttcattaaaaaaaattgataagctcattatgcaaattaaatttattagacagagttttactttgtgcatctcatatgagattataaagtttcagaattcattctagagggcctcatccatagttgtacacctcttagagatttgccatttgagtttttcttcaattctcatatacttattcaaggacaaatatctcttctttatttataaagttatgaagacctccttagacctttcttcaataggtgcatgtgaacacaatgtatttgaaatttggttatgttctgaaatagtttgaatgaacttatatttatacatgcatgataaatataaataatttaataagacataaaatccaaataaatttagtcattgttaaactaaataactcttcccgaaaagttagaggaatactctcctcctaataagatatgtgtaaatgttcatattgacagaattcctgttgtttagtatctaacaagaggaagctatctacataaattataaaatttttcagaattatctcacttttgatatagttatatatatgtttttctaactaactttccaccacctgccttctccatctgtcctccatcccttacgttgatcataagaagggaagaaaaataagccgggagatgatactctaaatccaacttagaaattatctttagaattctttctttcttttactttatttggaaggaaataaaatggaataaaataaaaattatttttacagatgaaagaaatctgaggtctttacctttctacacttattcaatatgcatttattaaatattaattatttgacatgatgtcaaagtattagtttctaatattaaggatatgattatcttaattcacaagatgatcggcaaatgtaatttgcttgtcttttttttccttttgcctttatgaaagaattagaggtctgtaaattaccaagagaaatgagatgtgaaactgagaaggcaagtcaagtaggcatgttagaggcaactgactactttaggcagggctgcaagctcacttcttccactatgggttctcggccaaccctttttccttttctaaaaagaacaatgttgtaatctcgtttaaaagttcaaataacttttttttttaaattagtgtctttgtccttgtccaaataatgtaatgtaactttcttttaacaaagaataagataaaatgttttaaaataatcattaccatgtgagttagtaaactgtagaacagacagcaaagagtacacaagaacaattatgaaaacatgctttctctttctgcaagtgcaatgtgacctctgaattgatatatagcaataagagagccttatttgtggttccatgctcttctagtaaaacaagtaacattaaattttctctagtgttccaagtcatatatgtccacaaagcattacatattttcaatgatggtgttgtgttactcattcatacttttagtacttcattttctatcttcagtgttcaattattttgtgtttatttcatatggcatgaaaggtcttttaatttgatttagataagacctttcaaaaagagaaaaagccaacataatgcaaatatcattttttaactgctacctaacttgacaaaaaagatctatttatgtaagtatttttctttatcaattaaagtttattaatttgactttcattgcttacactctaatggccattttcctaaaaatactatttcccaaaatgtttgttttctacagtatcagttactttggatcttatctttggcaaaaataaaaataaaatattcacaaacaacatggaggttgtttgaaactttatcatcttgattaatggtttaaggatggtgagttgttgagtttgcacttaaaagatgaatggtgatatacagatgcaactggattattccatttgacaaaattatatatgaaaaagttatctgaaatctttagtgaatattctccgaagttattttccaacagcatagcacaagagagagaatagaggcctggtggcaggtgaacctgggtccacattgcagttgccacatctacgatttgtataaatatagaccaataaaaactacccaaatcagctgggcgcagtggctcactgtaatcccagcactttgggagaccgaggcaagtggattttgaggtcaagagatggagaccatcgttgctaacatggtgaaaccccatttctactaaaaatacaaaaaatagctgggcgtggtgtcaagcgcccacagtcccagctactcaggaggctgaggcaggagaatcacttgaaccagggaggtggaggttgcagtgagccgagatcgcaccactgcactccaggctgggtgacacagcgagattctgcctcaaaaaaaaaaaaaaaaaaaaacccaaatcacaatattgtttgatgtactatgtgaaatcacataacagtaacattaatacaacttctggcacataagaagtgctttatttgcatttcccttaccatgtgttaccatactcccagtttcacttttggtaaatatatacatttctattatctgttatcaattaaaggtcccgtcttaatgcatagttgccaattaacaaaattcactagatgtgagatttaagaacattctgttttaaatattctctaatattaataccattagtaatgatactaatttgcctatttttaatattaatattaatagctaccttttatagaacatttagtgtgagacagtactctgttttgtaggtaggttatctccaatcttcaaatgacttgcaaggtggaagttattatctttagtttccaggtgaggttctgaaaggttaaatgacttgtctaggtggacacaactatcatgaagggaaactgatgttaaaatctgtttttccggcccggtggatcacgaggtcaggagatcgagaccatcttggctaacagggtgaaacgccgtctctactaaaaatagaaagaaacattagccgggcgtggtggcaggcgcctgtagtcccagctactcgggaggctgaggcaggagaatggcgtgaacccgggaggcggagcttgaagtgagccgaaatcacgccactgcactccagcctgggcgacagagcgagactcagtctcaaaaaaaaaaaaaaaaaaaagaaaatctgtttttccgtttctaaaatctgctttttcctgaagcagtgttattccttgaagaaaacatatattccatagttgatgaaattaacctgtaaataggtgaatgtattgatttgaattctaaactgcagtctcatctatagaaactttattttttacacttgatatattccccggtacgatcattgaattattctaaacaactttttcttgcccttatgtctgaatgaatggtatatacggtgtgtcatctttgaaaaacacaacaacatatttctttccttctatactaaatctgcttgaaaactaattgaaaatgttggattattctttctcatttttatcagatttgtagattatcttacattcacaaaaatctcatggacaaacatatctacatttgcataccttaatcattgtttcccataacattgttatcatcttgaactgttatatggttatatgcctaagagttaagggattctttaaaaaaaaaagtgttaacaaatttaccaaggacagttcaaagacctttgtcattttttttttattagtaacttgcagtttcatgttgtttgtttagtttttactacctttttcatccagaaaaataagtaaaagccaatatagcttttgaaatggaaaaattgtttcaaatcattggcaaagcttaatgacttctgactgctgagatatgttaatttaagccagaccaaatgttcctcagctgcaaatatttggtgttgttcactgggaactggcaagatttatgagggcccagtggcaaagactctgtgctcatatccctctcattgtaattgtttcccatgttcaatgatgaaggaccgatacggaagaaaataccaacttttcaggggtggtcacttagactcaaataagatgctatttcacatttgatttactatggcatcctcatgccatcttagttatcaaagccctttcaacttttctactccaattttgggaaaatacaatctgttactatccaagttgctccgaagttgcaacgcaaagaaggaaatgacttacatttggcaatttgtaactataagatatgcaatggtaatttaaaagttatatgagtaatgtgtagtacaaatataagtataatatgcttatattatttttaacagcattttaacctctttttataaattagttgtgatgcattcaagaataaccaaagatattttaatttaaattaaattaataatttaatcattatttactaatttaaataattgaaataatattaaattgatcttgcaaacatattgaaggcaactcacattctgcaaagacaaaaagtaatgctgttaaatacacatgaaaatttatatttatgtgataatcatttactgtttagaagtattaataattgcaagtgtttttaatacctcttaaagattagatattaataacagaaataattccaaatgaatataatatacaaagtttaagctttccaacgaagaactgagcctagggcacattctgacactgaaggagacagctcaggaagacttcactgagaagaaaagcaagtcttaaatgtctaacaataattcagcaaatagctttgtaatactagtgcagaccaccttgctcttacataacagtaaagtttattgtaagcattctttgtattagttattatacatacatatatatacctatatatatatatatatatacacacacacatatgtatgtatgatcatggcagaacaattcttacttcaaaatgattgcatttaaaactaagtcataatcaaacctgtatatagtgcttattatataccagatgcaagtttaaagttacatgcactaattctctgagttcaaaaatgacttttggaagtaggcactattattatttttcccattttacagattaagaaatagataccagaagatatttgtagtcagtatgtgtgctcttaaccagaatcctttatgacttttcaacttccgttgtcttttaggaaataggtcaacaattatttgcttccattacaatatgataagaaaatggaactgccagtgaagacagaaaagaccttacatgtttattcaaatgctttgttacataccctgaatttttatccatataaaggcacagctggtaaaatatatggtatttgtaaaaggatgaatgtatttgcattttgcatgtaatatcacaagactctatgtatcgttaaaagagtcagtctctgcattattccatattgaattccttaattatgtatctctgtataataaaaggaaaagtgctgacagaatgcagtagaaaaatctaaattcttttcttgcaataaatgtgacacagattgtataaagcaatatttttgcccttgaaatgtttagaagcattgacattctgtccactaaattgtcagcttgtctttaaggttagagcttctaagttcttagcatttaacacactgacattgatctcttggttcttcaaacttgtatatcagcagcagtctcgacttgattttgaagcagagcattaaaaatgttatccttgatggtgatatctcataatttccatctattatgctaggatttttgaatcaagtttccaatctttaagcttcattccaaaaatactattaatcttaaagtttttgataagcttaatgttagaaaatgtcttagttatgaagaaacagtgaagtagataataaaatacaaatctaaaagctaaagtaactaatcggttccagcctgacaaatacttaaagaaaccatttgaataagaatgtccacaacacttattattttgttttgaggacttgggtagtcctcatgtcttcaattactttcccaagattatgggaatatttccaagaaaaaataggcatacacatactctttatttgttaattttgaatttgtgtctgtggggaaaataatttatattgtttaaaataatatttattaattcttgacaataacgggactttccagataatgttttcattaatccattagttggttaaagaatcacaaaaagaaatgtcagtgggatttttttaaaaaagatttctttgattctctccacccacaggctctgagcaaggcagtaaatagtccatttttgttaatgaagcttccctcatacagctgggattgtttaatattttacgagtgttactttgttttgctctcaacgatctcaggcagttaaggatttatgaatcgtgtttttctcagcccatctgcggtttcctatcttccctggccttgagaatatgtttaaatttattaaagcgaagcaaaggctcattatttcaaaggagagccaaagtgacacagtgaattggttattaatggaaaggcactgccatagggcgattgaaatttaatgatatcctacaagaaaaaaatgagggtgtcactttccaaaaagtcatgctaaatgccagcctttttaaggtcctgccgctaattttatgcctgcgcacagtaatgttttcaaaagcgtttaggaaacacggaccagtgactgtactgattatccttttcaccttcgcgcctgttccaaatgggtttgtgcagtgagcgatttaatctctaaatatagggaacgttaaaaaaaaaataacattgctgtttttcacaagctaagggccttttgcaatcctccggagatggacttgcaaatatgctatctccatatgctctcaataagctctcaaactggcggatcaccaaaaaagaaaaaaagcaatcccttcattttttttatttctgtcattcaaaagatgttttaatgtcatagtctacaaactatatttattaatactcagctaacattcagcttgagctacaaaatgggatttgacgtaatttaagttttccttatttaacttaggctcttcattgaattacagtatcgaaagaccaaaatgccacttcatctcgccccatttaatgcaaaccagagatgcctatctattaaaaagcacactttgttgatatattgaatcattctttttagagttactgactcagtgatttcctgtattaattgaaatatccataaattatttttaaagttatctcaaattcctctagaaaaaattgttgacatgataatgtagcaatcatgcttcaggacattatttgccatacagatttctgaaagcctggttttcattttacagcttttgctttatttgaattattctacaagtgtaatcactgtggtcctaatgtttttctctgtatctctttcaaatatgttattgaaatttgaagagaatcgccaggaaatggcacaagttaaatttagggttttagttcaattagacttgtgattcagcaatttaagcaatgtgttaattacatgaagtaaatacgaacatttttaatgcaaaaacagcattggatctagttttaatgcatctttacttgctgaatataaactaaaatgtaaatggtgcatttgacatgcactgtggtaacatataattttcacatactgcatatggtaaaattaaattgtctactggtggcaaacagtttttggaagtagaatagaatgagttctttttcctgtttatgacaaaacacgttattcgagaatttatgaaattaatttttaaaaattaaatttacactcaattcagaattacattaataagattttataacttgtgatcacacattggggaacttttcatttattctaggtcagagtgtgaatctgaatagatgagaataatgttcaaatctaagagacagtaatgcatcttgtaggagaaaaatcacttggaagagggtgtcaaggacccacagtttaaatttctctaggcccttcctctctttttacagtaaacttatcatcctataatcttcctaacaaagacataaacactttggctacatatattttgattgtttcacgacagtttactggaggctgagcaatgacagatttcttcattgtcttttagccaaaatttgtcctttaagtcatttttgttgactgccccttttagcagctcacctcacaatgagagagaagacaattaatgggagggtgatttatcactgccaaaaactgtcaaggacttcagttgtagctggagaaaaagcaatttcacattatggcatttcattctgaatacattgtatttacagcacacagttttattttcagagcctattatcaggtgaaacagttgcatctgaaatgttgtttgtgacataggtgacctgttaggatttgataagtatttacgccagagcacaaggggctcacacatctgctgttggcagaagcaatggaaaaaaataacctggaaatgaggcgtttgatttttctggttcctacactcgagcatctgttgctataattaagtggcattcagtaattgcagagcaatggtgaaataaacatatgcattcttgccagcttttaggatttggtgtccttacagtaggagagacaagcaaagtaacttcagtaagaacaaaaggttttgtagcaaagtttaacaattaacttttcgataaaagagagaaaagaatttcacattagaaaacaatttcatcaaaaagcgaaatagtatacagttttagaagaaggaagtcccagaaacattcaacccttggaataaacttttcatctgtatggatgtcgaaatgggttaaactgtcattcctgaatgttatattacaggagagtaaaagaataataaaaatatagttattactcatattaatggtattgtgccatgaaatagagattatagtgaaatctgtttaataaactgaaggttgtatttggtgagttataagaaatcaacatgtatgcactggaagtgatcctccctcctcagcctccagagtagcagggactacaggtgctcaccactgcgcttggtttggaacttgacttttaatagcagtatgatggattatttggggcgaaagtagtgttctcatcaaaatagacagaaagcgattctcaaggtagggaggtgcggcgtggtggtaggaagggctgcagcagaacctcaggtttttttgatttataatccacaagtctcaaccctcttcccccagtacttctgagatctgaatctcaatgtggagggaagagtttgaaaaagctacccagtgtcttctgaggtgttctcattgccactcaccccacattgcagagaatgttttgcctgtgaaacaaataatagtttatattagcaaaacttgaaagctctctgcttatgaatactacatccacttactaaaaacaattctttgattaatatgctttatgttccattagttattcagaacaatccagattcttccacaaacagagtagaacaatttggatttggttgttatactgtagtagtttgcagtttcctggaaatgtcacatgacaaattccattgtgctataaatagttccacaacaatgacttttgaagtgaagagaaaatgtgaaattcaaactctattgaaatcgaagttttagcatatattgttaaagttgaatagttttcattattattagtatggacagtatggtgtttaagtagataaaggtacagttacaaaggtgaggctcttcgtctttaaaccatttgagagggaaccatgaagcttaagtatggtgtagaggctgaccgcgtaggcgatttggcatttttatgtgatgctctgggatcaggtgattactttactttctgggtgaagaaaagacatgaggaatcacccatgaagagatgagaatgatagattatggcttcatagtgtcaaaaaatgttggacatctgcttagaggaaaccatataggaataacagttaccttgcctttgaaagactgaagaatcattttgaagttccttttttctttcctccaggaggtggttttaaaatgtgttttaaaataggtttaaaattttggattcccattcaagcagtattgaatagtagtgagatttagacctatgttaaacctacatatatttatacatctctatctacatccatatccatattcatatgtgtatatttttaagatgacaaaatcataacctattataaaggggacagaaagaaaaatatggtccctgccctccatttgctttcaaaaggtatagtattaatagaaatctattacatgcacacactatatgccaaatattattctaaatactagaagtgtaataacttagtcctcacagcaacttacaagacagctgcattactgttatctccattttacaaatgaagataataagacagagtccaaggtcatgtggctaatagatagcagtcaggtctgggaattgaattccagcagtttggctccagagcccatgctctttgccacaatgctattcacttaaaataatgatgaatacagacatgttttctggacctgtagagtttagagcttaaaagtgatgtagcttaaatgtatgtatgctttataagtgggaaatatagtatatatgcttacaaattatctttttagcctacatatctgcctactaacttaccttctcacctaactaccataatactatgatattattggaattaacactatgttaatattgattttaaatttccctttcttctttctccaatgcaaggatctttgtactttcatatacttcctgatatcaggcacacaggctgctattgttaattcaatttccttttaagtctaactatctcccttggatgaactattccttgattttatatgtaattgtctataattgtataacatagtttttttgtgtgtatagttcaatctatactgtctatacttaaactatttattttgattgtaatcaataatttgtccctagcattttattttttggtttacatactagattcctggatccttattaacttgtccttctaaacttacatatgattatctcctttaatttttttctcaaaagtcttcattatttcaccttccctaattcttgtttagagttttggggacaagcttcaatttattctatatttaatctggatagtctaaaataattgcaatagcattttacaaaaatcctgtggattgaactgtttcttcatttccatgaggtttgatgctctggcaagagtatggcattattacacctaattcttaccataatcttctgaagatggtaccattttatctctgttttaatgatgaggaaatctagatcaataatgggatacaactgcccaagactcagagtttaagaatgacaaaacatggaagaaacccaaatttgacttcaactagtgcttcttctctctaagctgccttatactccagtggctttggacttgttttgtttccatttgatgctaaaattattttatatatggaaattttagaaaatataagcaatggcaatgtggtggtgaccatataaatttgcttgtttaatggtgtcttgattcctgttcaaaggcttaagcctgcacaatatatgtgctatgttagttaggatatatatatatatatatatatatactactttggtttggacacaaacatctaaacaataaatgatctgaaacatttgtggtgaagtgttatttggtgctcagaattatttcatttattaattttcagtgtgattggtgtttctttaaagaaaactttagaattcattttgtacttatgttgtatttagatcagtttattaataaaaacattaaaaatcttaacaattatatttacctaagtaaaattactgtaaacaggagagcataatggttgaaaacatgagctctggattcagggaaacaagatttcacctttaacccaattacataatgagcatgctattaaattgtgacatttattagctctattaatccttgttttataaatgggaaaaatgggaataattttggaaaaatggtaggaaacctgcctaatggagaagttctaagaacaatttaataatgtagacatgggtaactattgttcctaccatgtttcatcatcatcaatcatctctgcagcctatagccacaaatttaccaacagattaggtgccaaaaactcacttgtgatttgtttgaaagtttaaatactatttcccgtcatagaataacattataaatataggttagagctaattgaaataatgctatcagctcattagtgatacactatacatttgttatgggttaaataggctctctggagaaaccagaactagactatttagaatgattatgataaagggtgctactaatcttattgtatagaacagaatccagcaatttttttctataaagggagagatagtaaatattttgggattattggacacataatttctgtctacacaactactcaactactcgactctcctgttgtagtgagaaaccagatgtatatggtatataaatgaacaattgggactctgcttcagtaaaactttacggatcttgaaatttgagtttcataaaaatttcagatgtcaccaaatattcttctttttattttatttttttcaaacatttcaaaatgcagaaaccattctttgctcactagctgtacagaatcaggcagcaggttggatctgacctatggtccatagtttgcctacccttgttctaaaatatgatttctgtttcctctaaactttcttgttccaaaatagtttatttcagtcacccctgtcagcctctcacctctcaggtatctaaaaggttcaaaaaaattgaaaactgattatttttacaaaaagcttgaacacacatggactaagacagagtgttagtaacttggaacctgaatcagaaggcccagaccccttattttgaaagcaaaggaaatcatctcatacctaatggaattgctataaaagacacatgaaatgatactttaagtaatcataagttaggtagcactgtagaattgggagacagaattttactatattagtttgttggagtcatcataacaaaatgccacagcctggatgggttaaacaacagatttttttttttccacagttctgaaggctagaagttcaaaatcaaggtttgggtagttttggtttgtgctgaggcctctctccttggctttccagatgactgtgtcctcatatggcctttcctctgtgcatgtacctccatgatgccttttcctctttttgtaaggatatcagtcctaatagattaaaggtctcacccttatgaccttatttaaacttagttacatctttcaaggttctatctccaaaaatagtcacattgggcattatagcttcaacacatcaatttgaagggacatatttcagttcacactagtattacatattaatgattaaattgtccattaaacaaggtaggttaccaagctgaatccccttagatatgacagaggtagagtagttggtgttacaatgaggatacattttataatagcttcttcagttaggctcactatttaaaactgaggttatttccatctgagataaatcaaaatagaatgaattatattacactgaattttggttggactaatttgtttttgtatttggtataggaaaataaagtgccaaggagtaaaattaatttgcttgatagagattgatttttgacctgagaaaggttagactagcaaatgcttttaactccaggaataagaagcaatgcttcaggacttctggttgtgctcatgcaggagactttggccaagatatagagtatgtttcccctaatgttttctacttcttatgacttcctttccagtgaacattggactacttatttccttaacgtttatttggtatttatcatgtgcacctttgttattgttaatttaatccatgtgtatttggcttctaaagaccaaaatgtagtgaaagataatgtagtctagaaaaatctagaagttttacaaaaaataaagaaataaagtccacacacaactacgaagactgacaggtgtttaatggacacacattcataatcaagctcctgttgacaaccattatttgaagattcagttatatagttaatttctttcttttaagccaaaaagtggcagttgagttaattttgtcaataatgtgtagattcatgttatgggatgtagtttgctaagaacctagtggaagccatataagtaattttaattgagatttttacaaccatttgataacagtgttttgatcactgtagttagggcaggattccaacagtggccataaaatctgtgactaatccattgagtcacccagtctctgtcatatattgtttaatggcgcatgctaccagaaattattatcactttctagtgataatttttaagaagagaaactttgtagacacaaaagatgaatataagttgaaaacttacgcttataaagacagttaataaaacatcccctcactaaggtatatgagagtatactcatgtatttataatggctcttaagtctcaaatcatatatatatatataaacataaaaatatatgtgtgtgcatatatatatgtatatatgagactgatgaatattttaactttccttggttaatgtttgtagggcacttacagatgctagaataatctctaatgtttttgctcaatctgctctggagatggatgaaataaatagtttaaactaattaatgtaacaccagctgttacaagtgcttggcagacgtctgtgcgttttgatgggcagggagcggctgttgtacttgactttattttagtacaatgttgatcacagtgtaagctggaataaatgacaagccaaaagaaggaacagaggatgaatttcatgtaatgaaaaataaataccatcttctttttctaaaaatatatatgtgttttaaggtgggggagagagactgttgggctggacttcattaagtcataaggcgtttgacagctgctagtttaaacatgctgctaaaatacaggtacgtgatcttggacactgtccttgatttttccaaaggacctattaaagttgcaggtatgcagtgtcagctagatgtttgagaccctctttctgctaattagacgcctttagaaaaaaaaataaaaggaaagatactatagtcatccagacaagataggggaattattttaattgtactatttgagcaagtggaatgggaaaatactgggttttatggcttggtgattatgaatattattatttttaagtttctacaaggtatttgcatctacttctgtacatctaattccctcatggaaaaaagcaaagaaattaaccgccagcaaaatctgagctctcttggtccactggaatggaatggaactgcctatctccttgtgatgagggtttctttcctcatcctacaatggataaaaatcctcctaccaacgtgcttattgtttccataagcgtgaagtttaaatagcctcctaacttctttcttaagttggagggcagaatcgttgtgctctgacagagaaatagtggttgttatctcagtgtgtgccaacattaagataacagtgtcattgtgcagattgttaccctgtgaatttgtctaataagttattacaacgtgtgcagagcagatggcaagtgtgctcctgaaagaattgatggataggatatgatgtcatcagtgagatgacaaggttcacaaggtacttgacctccaagaataagtcctaactggttagaattctaaatggtgaactttggtgacactagctaaatgggaaatatgtgcaatttgtatttctttatggtggtgtttaccccctttactgaactccacataatgggattttgtccctgaagactcagagatattgttggagggttgcaccgtgtaaccttctgaggatttcaaatacaaatctacacatctaaactttaacaaaatcatagcaaatgttatttatgaagtcaggttcagagctttcccttttttatatgtatatatgcagaaagaacatagttaagacatcccattaattttaacatgttatcacaaaatagcaaaatgctgactccgtgaaaatattcagtgcataaaattaaacttttatattttcgttggaatatgtttctatatatacaagcctaaaataagctgtcagagatcctgatgttgtctttatattttcattatgactttacttgcacttacaggggacagacctaaacacattaacatttttacttcaatattatcttttttaaaaatttcaattgacttcagaatctcttccttatcacctatgagttgtgatctcaaaatttacattggcctggaaaatgtattctggaaaaatatcataacatgtgtgattaaagatatggtgactcaaaggaaaggtaggcaaagtgtgatactagtatatgtgcattgtgcaaaatcaaataaaaaaacctaaccatttataattgttgtgtgggaagaggttgactgattaaaagacatgcccaagaagaaaacattgtagatttattaaggaaaggactaagcatcaaatgcatgaacttccatctgctaaacattcttgacatcaaattttacatataagctgacaagaattctaaggtctaacaaaaataaattaccctaagtgtggtgggctgcattatcctttttgttcattttgaataactaagctgaagttataaataggcaagaatttttttagagacaagtttcatttcattgaaggagatgaaagaaatgtacacatataactctgtctaacataaaggatatgcatgtttttgtggcaatttatgaaagaatatttaagtccttggaatagtaatttcattatgaaatataactatatatatctatatatacacaattggtattaacaaagttatagtaatagtaattttttatcaactgaatgaacttgaagataaattaccctacaaagtttattcatttgataactttacatgaacttgtagtagcagaagatgcagaaatatagtattttaattcattcttttttatataaatccttactaaccgtaaataaagttctgagggtttcttaattactttacattgacagcaaaagtttagcctatagttgcaaatgttatagcaatgaattaattttagagcaattacttggtaatatagattataatttagatttagccttatctatttggatatatcaaagcctatatgtttaagccacttcttagcttatactatcatgtgttaatattgcctagatgattagcataattaaacagtattctgtcaatgtatatcaagtgatcaaaggagcttatgaaattatttgataaattattcaaatggactttttatttttaatataaatgagataacagaactcatatctcataccacattgacactcagtattgattatatggctaaaccattttcaggagctgcctttacttaatctgatctctttttctgtctgaggcagataaaatattaatacaaggtaaatgagtgttcactgaacttgccatatggcccctgtggaggacagaggggcctgggcagcctatggacttgccatatgggcctagagggaaaaggtaagtattacacagagaacaaatctaccatatggactgggtggagcacttgagactgtaaatactttcttatactggagcatgttcacaaaagaataaaaaccacataaataatacattatacaaaacccttgaaaatggatcaattgtttagatttaatatgatgctttcaagcaatgtccagagcatataaataatcatggtttactttgaaatggcaaagaggatcatcaatcatttacccttgacatttttacattgcatttaacatctgttccataatagcatggtacagtaatatacttaacatcatattacacactgaatctaaacaaataaatataatactaaattagagtttctgaatgtttgccttgcttctactaatatttttgcaaatactgtattatctgcccttttcatcacttgaattttttgttattatatagagcagatgaaattaagcaaatggcaaaagcaattttcttggtacaatcaaacctcattaatttggtttctgctaatatggaatttatgataattcagcttgggcttgataaagtttacctttgttctagatataaagaaaagatttgctaagccaattattagtataaacaagatgacaatgagcatgtttaacccacttaagagagcatacttttaaaggatttcagcacattaatggaatgcaaatacatactgctaataacaaatgagtctaatttagtctttgaaacaggtcttgtagtacctgtatttggtagcagatggttccaattactgtatatatttctaagttctgtgcatatttctttaccgtgtctattacttatattttgtggaatttaagcctactcattttcaccaatcactatcttattttagtctctaaagcatctatgtcaattattttttaaatgtataatctttttaaaaatgtataatctttaaaaaaagattattcttctagattttcttccaaggtatataccttgattcttttgtgggtttcttaaatagggttttataagtgaaacaacaaaaggcctttaagaatcaatttagacacacacagtttggcaactatggatgtatttgaaattgtatttcaagttatttgtgcaattccttatagccaatttacacatgaatacattaacatttattcatacaggagtttgatatgttcaggatctgacaacactatattgaacactttgagatccaagaaaagtttattaaaggccaaaattatccaaatttttggagtttattggtctactggaccaaatatttgtgttcacgccaaattctttattaagaatttggtctttactcagtcttcagagttgacattttactttctcctctgttttagtattttgctttccttttgtgttttcctgttatctctacagaaggacattagagcgtctccctctgttcccttactttttctcctttcatataatggtacttgttaatccgtgcggtaaaccaaagggaaatttatagtactttaaattaaaagaatgtgtagggcagaggaacataatgcagagaaggctaggcagtatgcagaatgccaacaggtgggtgccaggaaaatgggttatagcaggaaatagataacaaatgaaggcctagaaatagaaggcaaaagtaaagtttcaaaaaaaattggtatttgaatgcattaggggatgcttgaccatggaaagttgggttctgggttgaatttccaaaaaagaaatgctgaaattggtaacataagaagtatagacctagggaaatgaagcgttttgagcatggaaccaagacacactttctggtatagaatggacctcagttacagttttaggaataaatcctgtagggaagcaaggcagggatataattactagaagcaggacccaaggccagagtagatcagtaaagacaaattgatgctgagtttctgtttgttaaatctcctagcttaatatgccttgtattactccttctgctgaaacaaaagattggtttcaatagttgctggcagttggaaatctagttaaaggctaagtggcatatgtataaaggcaaggaaaagaaaggtaatcattataattttagttccatacctaagaggctagtaaggtttgttcctttcctttttccattttttaaattttatttttttaaaaggaataaatgtagacagctgtgatagccattcaatgctcttgaattgagtttttctctttttactttatgttttgttttgtttatatttccatctttcccttaattagaaaacaagtaagaattttgggctcagggtttctagtaaataaaacaaatctttatttccaggggaccattatcaagcactcatattttcctccactctgtattgtggctccattctagagggtttcctttctaatttcctcgtttgtttaatatcactacattttttttggctctcagcacataaatgaggatttttctatttcacttgtacttcttcctcatttcagtttcctcacaaattcccacaaatttttttctcaatctctttggaacaagagtgcctaaccagtcaataacaaggttataaatagtagttttctaaactggctgccaccaccatgctcatctttcttccatactcacatgcgtgtcatgtgtctactctgtaaaatatggattgggatgtgtaatggacctcccttgttagtccttgttactgttagcattgctcctacaagaattccataggcttttacaagcacataacgtagtgctgtagaaaaaagcaaaaacaaaaacatagtaatgaatttgtataaacattatttcaaattctggctctgttcctgtgtaatattaggaaaattactcaatctctttaaggttcaggtttttttatgatgaaaaggagataataattctatgcaacatttttgtgagagttacatagaataatgtgttcaaagatctagtatagagataaaagtattttactgcaacatttaataatagcaaacattttgaaacaaactgaacgttgcaatagaggaaggcataaatgagataaaacattgctgtgtaatggaataccattcagcacttcaaatgaataaatagatttacatgaatcaagccttaaaacacagttttgagtctcaaaaacataatgaaagttgaaaaaatatattaatggcatgatattgcttatttaaatttaacctaaaatatgttcaatgtttctcatagttgcacacaaatttggataaatctatgtctttgtaactctatgaactagaatgtcacactaacgattcatcttgttatttgaccctggaaaggaggggaatagaatgggactgagattaacaaaatgataggaggaggtgtgggattggataatgaagtgttcattttttgaacattttttttaggatatctattagatatccccgtagagatgtgagtccagagatgagggcacttcaggcaaaaggtctgagctaacgcaaataaattttggaggcatcagcatatagatggtatttaaaggcttgtgtctgaatgagatcattagaggattcgtatagcaaagagaaaaggtcagaaggcacctgttatgtcttaagcttaaaaggactagataagaatgaaaagcgttaaagagactaagaagaagctgctattgaggttttgggagaagaagaaagaatagtgtcctggaagccaagttaagaaagggtgtcaagaatgaagaaatgttcaatgtgtcaagggcctctaataagtcaagtagagggaggtctgataattgaccattggatttggtataatggacatcactgttaactttgataaaagtagttatactagagaactgggaataaaaagttgactagaatgagctcaagattaaattgtgaggaaaagataagataacagagtatagttaactcttgaaaaagaaactgaaaaactggaacaataattagaaggaacgatggtatccagggatgttttcttttttccattagatgggatataatatagcctggctatatgcaattagaactatttagttaagagcagaagagtctgtaaaagaaaggtacaattgcaggagaaatttgaggcagtacatttgaggcagagaagagaaggacttactgaatatcattgttaatatttggaaaaaccagctctaggacccatattgaaaaacttagtaaaaatataagccgactgtttcctacagaattttaaacttcgtgtttaggattgtatttcttctttatatttttaccacctctttgactccttcattacaatttaagccctgataaccttgtacttagacatattatttgtactcttaatttctcacactagttgtattcacctttcatctattagtctcattcctaattttttctactagttatattttatatattcttcatattgttatgagttggttttaattcacatcctttccagtttctgatctgtttcatgaaagaatgtttttgagtttcactgtacctagcacatttcattattggactcagttgataagattagtagagacagaggttgtatcagattctggatttctttcaaaatcatgctgaaagtttgagaattcagtttataatgaatagagagcaggcaattaaatcatatattttattaatgagtggagtgaggtgtggtagtagaaagatcagtcaaaagcaatgcacctgttaaggttaaatatactaatagtacatttatacaccctggtgtagggtgacagttgaagagaaacacagaaatgttaagaatattttgaagggataatttggtgagtgtatatgtgagaagaaaagttaaatacatcaaatcaaagctattcttagaataatttcaaagatggtggtatcactgcgaggaatagagatgataatagtgaaatgcatttggggaaactaagttttttatattatttttaatatgcttagggtgaggacatgtagataaactcaaactacagccatgtaattagttaacaatattaatttggccaggtgcagtggctcctgcctgtaattccaacactattgggaggctgaggcaggaggatggcgtgagcccaggagttcgagatcagcttgggcaacatagtgagaccttgtctctacaaaaactaaaaaaaaaagttacccaagttggtgtatgcctgtagtcccagctccttaggaggctgaggtgggaggactgcttgagcctaggaagttgaggctgcagtgagctataatcatgctactgcactctagactgggtgacagagcaagatcctatctatctacaaaaaaaaaaaagtaatttttaccacattcactgtttagatctgtcttccatgcatataaaatgatactaacaagtacaagttattcttttgttttcattatctttctaagagaaaataaaaattgtgagagtaatcatcatgagagggaacagaagcccaagtcagatgaagaaacaggacgaaaatacttggcaattcacaatgaattcaggccacgtgaattatatcacaagatatttagactaaatttacagtcaaatatgctgacccacaaaagaagtgatcagtaagtaaacgtactaatatgcagctatgattttttttaactggacagaggcacagttcacttgcagtgaaagaagtgcctccataatgaccctgaagaagattctaaaatcattccttaaaataatttcttagaaaacatgagtgcaatgactaggatttgtatgggctcatcagaaaagcattcttttaatctaggctcattttctttgcccaacagagaaatgaggaaataataggatgaacagattccagtaaacatttatagaatttttatgtttaattgttagcaataaatagatgatagacaattagaaaatatattaacattggcaggactaagcctaaagtggaggttcagtttagaaatttgataataggttgagataataaattatatacatttccaaaagttatgtattatctccatatattaaaaccttagccatgctgtaagaattgtgtcctgattatctttcattctggaattataattgttctcttccaggtagtcagtccaaggatggactagatgtcctcacttgccgtgacagttcctctgtcttatctttgttagagtattttctatacagtgttgcatttggcattcatccataaatatttctagagtgactagtttcaaatttgtctaattttccagctgaactaattggcaaaataaaatgtattcatatttcaaggttaattgcatttcataaaaagttcctgattaaatttatgattaaatttaacaattgtaaaaatagttttgttagtgaaggaaataacaactttcttaaaagtatcatgagatttttgaagttattgttataggaggcactatattaaaattctctgtggagaatttctatgctaaaaaacaaagttggggaatagattttagaatacattataagataaacaacagagaatactatatttatgaggattcccagcttaaaggaagaaacactaatatgaatgatctcctgtcactactgcatggatagatcggggatgtataagaatcttaagatgagtaggttgcaaaaattttctcccattttgtaggttgcctgttcactctgatggtagtttcttttgctgtgcagaagctctttagtttaattagatcccatttgtcaattttgtcttttgttgccattgcttttggtgttttagacatgaagtccttgcccatgcctatgtcctgaatggtaatgcctaggttttcttctagggtttttatggttttaggtctaacgtttaagtctttaatccatcttgaattcatttttgtataaggtgtaaggaagggatccagtttcagctttctacatatggctagccagttttcccagcaccatttattaaatagggaatcctttccccattgcttgtttttctcaggtttatcaaagatcagatagttgtagatatgtggcattatttctgagggctctgttctgttccattgatcaatatctctgttttggtaccagtaccatgctgctttggttactgtagccttgtagtatagtttgaagtcaggtagtgtgatgcctccagctttgttcttttggcttaggattgacttggcgatgcgggctcttttttggttccatatgaacttggaaccaacccaaatgtccaacaatgatagactggattaagaaagtgtggcacatatataccatggaatactatgcagccataaaaaatgatgagttcatgtcctttgtagggacatggatgaaattggaaatcatcattctcagtaaactatcgcaagaacaaaaaaccaaacaccgcatattctcactcataggtgggaattgaacaatgagatcacatggacacaggaaggggaatatcacactctggggactgttgtggggcggggggaggggggagggatagcaccgggagatatacctaatgctagatgacgagttagtgggttcagcacaccagcatggcacatgtatacatatgtaactaacctgcacaatgtgcacatgtaccctaaaacttaaagtataataaaaaaaaaaagaatcttaagagctttatgtgagttttgaaaatgcatgtaaatgtaatatttttatttatttcattttagttgtatttatttaaatttttctaatgtagaataacattaaataacagtatagtttttaatctatatcaagaggatgaaggaacaaaatctgcatgttttgtttgcttattcaaatgtgaaatgctttctaatcaagttgaatattttaattatttttaaatttttagtcaatattaagtcatttatggaaattgcctttcagtctgtatgccacttataatttgttaatcttaggtatataggctaaagtggaaagtactagaatatagaaagtaatagtaaaactttcagtttctacctggttttttcattcttatgaaatcttagtatatgagaaggaataagtaatgaaagataacttattatctaacaaaataaacttatttatttgcctaaagcttctggtgatatttaaggtaaattaataattgaaacagaacagaacagttattggatttactaaatatggaagagttctacatatgatatacctatatgtacctatgtacttatgtaactaagtgtatgtgtggtgtgcaatcatttaggtatacacacacaaacacacacacacacagaatctgctttactttgaaattgcttcaacagtagacttatatggttattttatctatagtaatataatgtatctcaagccttctaaatatactattaagaaaatttttaggctgggcgcagtggcttacgcctgtaatcccagtactttgggaggccgaggtgggtggatcatgaggccaggagattgagaccatcctggacgacatgaggaaaccctgtctctactaaaatacaaaaaagtagccgggcgtggtggcacacacctgtaattccagctacttgggacactgaggctgaggaatcacctgaacttcggagccggacgttgcagtgaaccgagatcttgccactgcactccagcctggcgacagagtaagactccagaaagaaagaaagaaggaaggaaggaaggaaggagatatctaattaacaaatatatgtgtttctaaatttgcgatttctcagtaagttaaaactgagttaagtgtacacaaatagtcgaagagattaattgatttcattgtgaaatatttttaaataatgtattgattcatcctacatgtaaaagccaggcaccattcaaggtataggagacacaacagctcacagtacagagagacatcttgttcttaaggaatttgtattgtaattgaagaagacaaacaataaggaaatatatagaaaaatatcaagtagtaataatggtagcttgatatacattgaacatgccatcgaaataaaaagtcactggttacataagaatgaaatggttctatattctcatgatacatccatgattaggaagagttgccatttctgtaagatcatgaccaaccttctcctgaacattctgagctacaacttgatgatcaggtctgcaagacttcactcaaatctggccttattacatctcaaattccattctaacctctctccccttagcgatctcatccacgctgcctttcctcagttcctcctaacgtgttatcttcccaggttcaattcttgatctgagctatgtcttttaccttgaatgcataaattcttcatcaattaaacaaattccacaaaataaatatgaggcattcatactattacacatatagaatacaaagcagaagataacaggaaatactttaatgaatgcagataacacaatgtttcttttttaatttgaaattttaaagtaactttaaaatttctaataatttttcaaattaaatttaaacataggtattaaagtaaaacaaccaagatttctcgtgttaattgttgactttttgagccaacagatgtgtatttcttaaatagagcacattgaaaagctagtaagtacaattttataaatctaacaacgtcatctcttttctgtgctacaaagaatgagtggttataaattgaaattattatttttaacttatatatagtagaggtccaggaatttacattatgtttttatgctctgagagttgcaaaatagcagctgtgctgttaaagaatccccttctcgccaagggaagaatgctgacaatgacataaacatacactcttaactttttatatttccctaaatcctaaaaattagtgctctcctttgcatttttatatggctatgttataaaacagttagttttaaaggaaaaagtcgtaaaatctcaataggtaaaagggatataaaggtcacttaatttaaccttctgtcaatttctaagaaatagtttccgtaatattcctgacaagaagcttatgaacatttgcttggacactctgccgtggcaaacctgggattgcccaaaacagccaatagtatttttaagtagatgaaccaaatcttactataatgttatatgcatttacttagtctcttttgctgcacagggcagccacaaatgtagtttattatttagtaaatattgggattttaaaatttagaatttaaatctcctaagttatttttatatgataaattcacatttctaaaaaggcaactcaaacaaaagcagtttttattatatcccttctcattcattcaggctcatctaacttaaagtaagtaactacaactaaaatttatctatgttgctatgagaataaaaggtttaataaattaactagttttgaaaataaattatatcagatattcaacaagtcatatataaaaatatgttatgtgccaggcattgaggctgcacaggtgaataaatggactgagttccttccctcacagtttttcatgttaaacaaacagacagaaataaacctgtaaagaaatttgataataatttttgatgaatttgatcatgtgaaatgatcctggtaatatatacttgtaatcagttgttgtatgtgggaaggaaaaaatgaagtggttctaggtatgacttgaagaaacctttgtcatttacatacggtgctgcctgtcccaagagatggtggcaaggcaagatgggaaagaagggacccattaaaacatacctgtagcttaagcgaagtcattgtacttagtaaattatcagacttacataaattaatttttctagaccagcaaactgatgcctagcttagggtagcattccaacagcatgttgcatgccagcttatcagagcaaagtagtcaccaagtgcaatgggaagtcccagtgctagcatggaacacattgacgcagtcagggaaggaatagtgtccaatactgaaagacggtgatttggaaacctacacaaggttcttatggtgacaaatgaggcagattcatgactaggattacaggatgaaggaattcaggagaagctaaattgggacaaatgcagaagataatttgttgcattatccaaggtttaattgcatctgataaatgggtaaagcatgagacttgctccttctgaaatgaacctcttggacaataattgttttgctttaaaaatccttaagtagactttgtgtttttaccccatagaatgcatgcatcaatttaaaagtagtactttcatggttaaacagctccgacaagggaagtatagaccttgttggtatggttagcatttgataaggtgtagggtggagaaatttccaaagagatattctgcataagctacctaaagttaaacttgatattaaatgtccactatactcatggttagaattttctagtctcatctgggaagattctggagtttcatttctgggataggtatcttagcaattaatcacagataatcacaaataatcataagtgtatcagtagtagtcaatttgatggaatctaggctggttgatgtgaacataggcttggttttagggaataagtcaagtcctaaggcggaggagtgaaatggaaaatctctacatttgccttctattccaagatacaattatattttttgaatatatatttatggcacaaacttgaatgcacatattaatgtatttttgaatgcccttaaaaaatttgtgtgttactccttgggtgtttaaacaacatgggctgtgaaataaggttatttgggctcaaattcaggctgctgtctttcctagttgagttacattggcaagttaattaacttcttttacctctacatattaatgtgtaaaataagtataacactagtaaaacagtaacagaattgttgtaaggattaaatgagccagtgcatgcaaagcatttaaaacattgctttgcacacataggaagcactctctgtgtgctagttatttatggtaatgatgaacatcatcatagcaatgcctctgactctgaagaaagaataagttataagttaatagaatctttactgagtagtattccttttctattaactttttattattgaaaatttcaaatatacataaaattagaagagtactgaattcccatatgcctacccatcattttgttttaacaatggtcatctcaaggcaaatcttgtctcatacttccacccaatttcttcccttcttccagagatttttgaagcaaatctcaaacatatgctctgtaatctgtacatatttttaatgtttttcttttttgttctactttacgttcagtgtatattttctaaagatgggtaaatcttttcttaaatcacaaacacataatctttatcactcctaaaatctcttaacatttactaaatatcccattaggcttcacatttcacctgttttcatatatgcgtatatgtgatgactgaaaaaccaagcactgctaacatacttaaagaggtttattctgagccaatgtgagtgtctgcagcctcgtgttacacagtctcaggaggtcctgggaaagtgcgcccgaagagatcgagttatagtttaattttatacatttcagggaaacgggaattgccgggaaaatcataaatcaatacatgagagatatacattggtttgatctgaaaaggcaggacatctcgaaccaggggcttttacagtcataggtggattttagagactctttgattgacaatttcagttgagagagttaagctattgtttaaagacttgaagttcgtagaaatgaatgcttaagttaagataaaggggtctgtggtcctatgatgctctaacagagtcagattggaaactgagccacaatattcaggcttaatttaaaaaaaaaccactttttaagtagattctatgatttgtagggcatgactccctaggcctcttagatagaagtttgagtgagagaaaaaaaaaggccagagttcagtctatatatgtatatttgtgggtggccatattcatggaatcattcaaaatattgtgctttccatgtatttcgtctaaattgacactttatcttttaatgagaaaagaaatgagaatcttcagacttgggtttgaaaaactttgggtcaatcagttattgggcttgtttcatctgaaaaatgaagaatgtagatgaggtgatttccaaaggcctcttacattttttataattccatgataattttagtctaaaagttacgtgcaaattagactttgaatatcagtcctcaacaccagagctagtgtgtatttcaggggtattatttgagaatcgttctgttttattcacatagcaatgacactcattttcggcttggagactcataaatgaattagagctatgcagagctgataagaagagaacagggtatcaaactatggcaccctgtgatggtgcctagcatttctcttcatttttgctttacttctaaagtcatattaactttgaaaaggccttggatttatgagacaactcttcctccctccccccgaaaattctcaaagcacatttcagaaactcatttttggcagatgtaaatttaagtaaattggccaaggtcacagcacaataagggcagagttatcaagggaatgcagtttcctgctttttccaccatccatgaaattagagtaactccaccccttaaaataaaagggtctacttttttttttctttctgaaattataaaccttgatttggaaattttttttaatcattaactcagactttcaaaagtggtcatttagagctgtggaatgtttatgggtgcactatgcatctactattactattactgaacatcttacgacctctacaatttgttttaaaagggagtgcattttttgtttgagctgaaccatcagattttcttttcatgcggtatgacatgaggaagaatctatctgtaggcacaaaactggttcactttctatgggcaagcgcagactttaaagtagattattaaagtacacagaaatagaaaattagatcagaagtgatgttttactgtgaggtcttctttgggccttataaaacgagaaagaactaaccttgttctatttctgagttctgaaaaaaaagcctcatagcaggcatatcacctttaattaggtttctgcttttgggaagcattttaccagccccctttcatttatttttaatgatgttatcactaacaggcaaacagtcccttaataaaacaaaaacagtttctatataaagcctggtgtacatgttctgagtcagtcatctaaaaacaaatgttatgattgtttccgttgtgctcttagaacacttaatggccctactgtgcagatatgcaaaacatcaacctaggaaatataaccgtgtctgttttgcagctttcaataaatgctttcccatattcacctgcagtatcagcagtgaggttaaacctactgggtcatggaaatgacagaaaggtcaattaagtgaatcttttcagcctaagctatgccagttcttgcataaacactgatgacttatgtcaagcagatgtgaatgcaacccaaaatatttgaaagttaaatcagtgtgtgtgtgtgtgtgtgtgtctgcgtgtgtgtgtgtgtgtgtgtgcgcgtgctcgcatgtgtgtgtgtttaatgcttggtgccattccatttttttccaagaaatttcaaattgtcaaaggaacaaaaacctctgtacacagatacccgagttctcaagttttgtctcctcagatgagtttgctaagataatgatggatttgctgtcaaggccaagattggaaatattaatagatagcttgatcttagaatttctgaatacagaaatttttgaaatacagatacagaatagccagaaactaaagattcttttttgagcataataatagaaaatatgatttccccctaaaaatacagtttcttcagggaattggggttcctgattttcttgagctgttatccttgcatggtttcctcatacaacctcttgacctccctctagttaagtcttccccaaaattcagtgcccgtttcttgccatggtggttttttttttttttcttctttcccctttcaactcacatcatctaaacagaatctcttcttttttctaaataagcaccaggtgccatttgaatcactcttttggcatataaccttattgagattataaatgcatgcatttaaaaaattttattcctagagcttcctcttaactcaagataatgtctgtgaaattgcctcgtaatcaatagagtggttttccaatagaaggtatttttagttttactatcatggatgtggtataaccctgggacaggcaaagactatatccttctcatttttgcagtctgtattcctccagcttttgctttgccttatctcattcacatattctttcagtaaatattaataagtacttactatatgttaggtagctgcgactagatgatcgatttcctcctcaaaagagtggtccccaactttcataagcatctcaaaagagaactattcaaaagttaagactcactgatataggtgatagttgcatataataagcgtggaatacatatgcattaaattaggcaacactgtgagtttggtgtatttttgtagcaaacctccaacattctgccaaacacaatgatttcattcccatatatttttttttcttttattcactcaaactcaaaattcagagttctaatgctgcttgaagtatatccaagaagcctcttaagtggttttatgttattcacagtctatttctgcaaaacctgtactgtgtgtgtatgtgtgtgtgtgtctgtgtatctgtgtgtgtgtgtgtgtgtgtgtgtgtgtgtgtgtgtgtgtgtcaacacatatttcctctaggtcctgccacctgaagagaaattgataaaccagttcatattctttgccctttcccaaattatttctatcaaagtcaattttaaccaaactaactcagggttagtccatataaggaaactgatgtatacagtaataattctttcatcaacattatacatcttcatcaaagccttatcagagagacataatatagaaactacagacttagagcaggggcgcagtggctcacgcctgtaatcccagcactttgggaggccgaggcaggcggatcacccaaggtggggagttcgagaccagcatgaccaacatggagaaaccccgtctctaccaacaaatacaaaattagcccggtacggtggcccatatctgtaaccccagctactcgggaggctgaggcaggagaaccacctgaacccaggatgcagaggttgccgtgagccgagattgagccattgtactccagtctgggcaataagagcgaaactcagtctcaaaaaaaaaaaggaagaaaccacaggcttatggtacaagaacagaatttcctccgtggcacattgaagccaagtttccaaaatgaaatttataaaatgtataattgattggattatttgttaattattcatccattcatactttatattaatatagtattttatattttacaaagcactttcacatgcataatctaattggatttaaactataatcctttgaattggtaatcatcgttttaataaataaatgaaatgagtctcaaataagagacaggttcttagctctaaaatttgcttgtacttggtagagccaggacttgaattcatactttcttaatcaagcctggtttgcttttcattttaccatagctgtatcatgtcttgcattttggtgtcaattttataaaaatttctggagtaactttaaatccagaatttgaagaatgggcattaagtaaaatataggaaataagttttattcccaaatacctctagatattttatatgcatcagcatagatatataaaagtcattttgataaattttaatgtgatatttcagaattccttattttctgagaagatggaggtagaaagaaaaaacatttacctgataattttttctcctttttttatctgtatatattcttgtggtacaagtgtaattttattatatggatagactgcatagtggtgaagtcagggttttggatatccattacctgaaaagcctacattgtactcgttaaataatttctcatcatgaacctcccccattcccacacccttctgagtctcaattgtctatcagtctacactctatgtccttgtacacattacttagctcccacttataaatgagaacatgaagtattcatctttctataactgacttgttttaagataatggcctccagatccagtcatattgctgcaaaagacataatttcattcttatttatggctgaatagtattccattttgtctatatatatacacatacacaatatatatatatgttgcatatctttttgtgtgtgtatatatatatatatatatatatatatatatatatatatatatatacatagcaatttttttgttttttgggagacaaagtcttgctgtgtcgctcaggctggagtgcagtggtgccatctccgctcaccgcaacctctgccccctaggttcaagccaatcttgtgctgtgcctcagccctccaaatagctgggattacagattcatgctaccacaccaaactaatttttgtacttttagtagagatggggcttctccatgttggtcaggctggtctctaactcctggcctcaagtgatccacctgcctgggactcccaaagtgctgggatttcaggcgtaagccactgtgcccggcctgtatcacattttttaatccagtcatcccctgatggacacttaggttgattttatatttttgccactgtgaatagtgctgtaataaacatacaagtgcaagtatctttttgatataacgatttctttccttatgggctggtatccagtagtggtattgctgggtcgaatagtagttttctttttagttctttgagaaatctgcatactgttttccatagaggttgtactaatttacattctcaccataatgtataaatattccctttcctttacaccctcatcaatatctgtaattttttctttctgtaaaatttattattagtatctactgctaaattaagccgagagtgcctagagtgagaatgaatcagtactgaggttacaattgagctcagtttaaacaactgtgttttatgtctggaaataattttcaaaattttttaggcaccaacccttaatctatagattatttatacttctactccaatttaatatgtctagtaagtttgccaaaacacttataaatgtatctttctgtatatttgtgatggacatttattaatataataaaattttatatttttataagtaattgtttacttctgtatggaaactattttattctctagtattttgctaaaatcttcttcactttgccagtatagaaatagagagttttcaaggaaactcccagatctgttttaaacattaaacatggagatattttccattttaataatactgtatacttcaactcgaaatgaataattgtgaatctctttgtaatgtgtgcttttctagaagtgattgagtgtttttctatttggaatttgtgatataataaaagacattagagaccaaaacacacagacacacattaacttgaaagagaatatataatccaaacccaaagggattagttatgaaaataacaactgagttagattttattaacaggaaagaaaacattttaaaagtagaggcccattatttttttaaacaacattgttccttaggatatcctgctaaattgttatgtgtgataagattggagagaaaaatactttgtcttacagaggcatcaatcttactgatagtcagttattgataagtgacttaatttttaaacattttcttctcttccatttctggtttctcattttgttttctattattctaattgactgtatgttgttataattatcaatgtatttattatataattattaagatgttaataagtagtttttctggtcaagattataatatgtgctgctttatttttctttagaaaaccactatagtttcaaataactgaattaaaaaacaaataattcttaacttacaatggcattacatcctgataaaacccatcataatttgaaaatattgtaaattaaaaatgcatttagtacacctaacctaccaaacgtcattgcttagcctaccctacctgaaatgtgctcacttacattaacctacagataggcaacttcatctaacacgaaacttattttataataaagtgttaaatatctcacatactgcatattgctaacccaggggaaaaaaagtcaaaattcaaaactcaaagtatcaaaattgcaatggttttataccattgtaaaattgaaaatcgcaatggtttcataccattgcatattgctaacccaggaaaaaaaaatcaaaattcaaagtatcaaaattgcagtggttttatactactgtaaaactgaaaattgcaatggtttcattccactaacaacttaatgtagagaactagcataactgccagaccctacccatgtgtagtcctctaaaaaataacagtattctagttactgcatcttttgaaagtgcttaatttttttcctaggaagatgcactttttgctgcatctgatttgccatcaaaggtattgggagtgctgccttataggtgactgaactgtgatctaatttaataaaagaaaacaagataatttaagaatcttataaagtggagcttgtaaacctaagtaattaataacttgttctgaaattttacttgtatgactcattctttttcagatattacatagatattcataaatctttgaaattaataattttaaaacttttaaaatttctaactccaaactgatacattgttactcttcatcataataggtgagaagcccacttaaataattttttataaatttttataaaaagtattagaaaatgtggaattttacatttgtgtggtcctacatttgtctcatttaacctgatatttttttgtaaatgaggaaattgaatagaaagaagttgttccacgtccaaagcagctaatactaactgaacatttaagttatttttattatatttgccagagaaaaagttacatactgttttagttatccatagctgtgtaataagttataccaaaacttagtggcttaaaccaacaaacatttatgtaggatttatgatcctacagtttctgtggctcaagaatctaggtacagcttccctgggtgcttctggtttaaggtctcatgggattgcaatcaatcaacctgtcagccagggctgcagccattaatgctttaactggttaggaagaatctactttcaacccaactcgtgaggttggccctcagtcccttgttgcatgtacgtctccacagggctgtctcatgtcatgtcaactggtttgacccatggcaagcaatgcaaaagaaagagagagagaaatggaagctagacattttataaccaaatctctgtctctgaagtgacatctcatgtttgttgtattctttttgttaggtcaagagaaaaggaccagacagggtgtgactaacaggataagaaatcatcacagtccctcttagaggccacttcgtgcttactacatgcccataaaaaaaaaaaaaaactcattaagaacatgtcacaaaaaagttaaaatatttgttatgtaactaccgtaaacaaaaaatctcaaaaataatacaattggaatgtggactcttgattaaatcatcgtattcttcatatgttattcttgctgattttggactgtgtttatgtaagagtgtgtccttgtacttaagaaatatacactgaaatcttaaggcttaattggggaagatggttcaaacatatgcaccctccctcacaccatacacacacacatacactcacacacacacacacacactcacacacacacagaacaagagagggagagaagcagagagagaatttaaaaaaaaaaaagtgacaaaatgtaaacaattggtgaactggagttttattacttttccagagctggccataacaaatgaccttaaccctggtgccttaaaacaacagaagtttattatctcacagttctggagactagaagtccaaaatgaaggtgtcagcagaaatgagctccttccaagggccattttttatctcttttagcttccagtggttgtctcccttccttaactgtaggtgaaacattctaacatctgcctagttttcactttgccttttctcttctctgtgtcttctcttctgcctctttcaaacctttctctgcttttgtcttaaaagacacttgccattggatttagggtccatcctaaaccaaaatgatctcctcatctcaagatcttaacttaattccctctgtgaaaacccttttttaaagtaaaataacattacttgtcgttacatgtcaggaagtatgaataaacatatagtttgcggtcagccattcacacattacaggactatgaaggaattccttgtacaattcgtgtaacttttctgtaagtatacaattattttaaagtaaaatgttttttaagaaaacaaaaaaaaacaagaaattacattgtcaaatgctatactaatccaaaaatcatgacatctgactagccaactttctcttaaagataagcttagaaatatgtacagatatatcaatgagaataaggtattttgtgaatttgtatttcatcatcattcactctttgaagtcagtggagattatgtgatgtcaaaactctcttctacattggcctctcaaacttttgctttaatcttcttagaacatttaggaaatcaaaggtcacttttatttcaaaaggtggaaccatggtcccaatattacaatctttgtaggaagagctaaacgaaatcttctatgatattaattgccacaagatgacaactttatgtctgataatagggtcatgagacccaaaggaatattcttgtttgtttgatcttcaagtagtttgtttgtgttcttttcaaaattgtgtattgactttaagaatcattttttcgcttcttaaacattctgccccaaatttgctaatttcttatgtacatattgaattaaagcgtccttacgtagtctcttcgctatgtaagatgataaatgaaggaatccaattagataagtttgtaacaaataatagcctattctcatacagctgaaaccacgaggcccaaaatgagcgttccattaaaacagctgcaggaaaaaatgtgcttacaggcatgcacgcacacatgtacatatatatatacagaattttactgctatatttggataaatggagtatctgaagaaataatgagtgaaggaaaactgtattagtggctataggaattagctatttaacaattgaaatcagtcactctaggctacatgagcctcttgaggctttctgtttgtgtttttagcatttgatctccagtatccagcacattgtttatgttaaataaatactggctacataaatttatgcatcatgagtgatttaatgatttaatccacacaacagccaaatgtagtcaagcataaatgcactgaagttaaatcaaataattatggggatgatgaaacttatagcctaaatgtgtgtaaatgtgtacacatacatatgattctttattttcttggacagtctttaataattgtggaatcatagattctaaagctgaaagcaacttcaggtggtcatctggttctatgcctttcttcaagagacaagcaattattatccccatgatctattaagccacattttctttagcatgtgacagctaaggtgatgatgatcgaaagatattgctctccattcttaaacaatttcacatgcacatatatgtttaacaagtgcctttccagagctattatgagaaaacactagcagccttggtttggaagagcaatttatgatagctaggtaaatggtgtccaagatcaccttgctcacattagccatgcagcatccctgcccctgcatggccatctttctttaaccctggtgacaagtgtgattaaaaagaaaaataacatgagtcctactttagtttgcttactctgtttcttcctctagtacttgctgcctcagatcatctgtctcagtaagttaacataggaggaagtagaaggagaaactgcaaagtcgtgagtgtgagaggagttaataggaggccttctggccgttactcccctctccagcttttctttccttttggtttattaactagaaatgtggcaaggtgagggagatgaatttaacttgttctgacattagtgagggacagggaagtgtggcagcttctacaatatttctgccccagagagacgtaattggaaaacgtgttgtgtggttagatggtgtaatgaaaaataaaagaatgattgaggagaacagtggaatcaaattataagcataaggcaagtgtgctgaagtttttagctacttgcaaaattgagagatactatcgggactgtgcaaatacattgctctgattaattttcctggggtgaaatatgaaaatatttataaaactgaggatcctgccatgaataaaattttctctgtgattatgataaactaaaataagccgtaacttgtatctatcttatgtgaaactgtaaaaatggttaaacaataaagaaaactgaataaaaggatttcactgtgagaggtgaaaagaatctgtattcatgagttactctaaattgcttaaaaatttgaagaatattcaataagactagtttattttgaagggatttttaaatttgattccctgaatgttgttatagaagtagcattttattactcttcctttataccgttttttatgtatggaagctataatttttcaatatgaaggtaaaaggtcttcaagttcaaaaaaattatgtctttaattttaatgatgatgaataattcagttataatttagaaatacatatttggattccagtttttctttttaggtgtaaagtgaaagattttaactttacattcttttgtaaattccttaagaatatatttgaacaaacattgatataaaggaagggttaatagagaaagaagcttcctaatatacaaagcccctctcttatatggagctctagaaatactctattgtcaatccaaacagaacaaactaaaaggagataattgggaaggtgcccataaagtcagcctgaatatattatcacaactatatatgagataatatttgttttaaaaagattctatggcactgtaaactcagtctcattagagactgcatttaaaaggcttataaagttactcattaatgttatcttgttgtatctccacagctttttcattaaagaaaattcagcagaaagcattttctcctgatagcaggaaccaatttgcaataaatgttctggaaaccactagggaagccattactgaggtctaataaaaacagacaagcgtaacttgttctatatttttgtttcaatcacatgcagatgagaccccgctttctacaccaaccgcaagagacagccttgacaaactctctctaactgggcatggacaaccactgcctccaggttttccatctccttttctgtttcctgatggactgtcttccatcgagactcttctgactaacatacaggtaggcctttttacaacctggaagaaagacatatggaacaccctgttgtagattttttttttccaaaatttatactgttcctacttaatcccattagactgactgaaacatggtattaaactcttcaagcaacttagattttaaacctgttacactaatcaaattagcttagaaatactcatatatatatatatattcatatatatgtatattaagccataataaaaacttagatgaaaatgacataggcctttaaaattcattctgtctaaaatgctctctttattaccaactaattggaggaatttaactgtttaagtttgtctgattttactaaacaacggcacactagttctaataaatatttagttatttttaaactgctggacttctagtgaggaaatgatatgtttagtcatttaaaatatgtctaatttagaagaatccaaaaaaatgccttctttcataaataagtttgtttcaattaatagaatttcttcaaagactagacttcaaaaagccttaccaaactttccacggatttcctatgtggtcctcaggatgtatattttatgtacagtacattatgaatcaaaaatacttacagttaacaataacatagagtgtggagccaagataataagagtgtttgggatagaagaaagcataattttcttgcccacacatgaagtgatcatgtggaccccagatggagatttttgtcatctacttctccatatttgggtagctagtgagtagtaggcagaagttgctgatagtgtgctggtaagctcctttttagaaaaattcttttactctaacattccatcctcagtaatatttttctgtacacatatcctatcatattaaagtttcccccagtggaaatgtaattaattttatttacctctccaaggacataacagaaggcctttaatgtaacatatcttctcatctattaatatggcattttttaatactaatgtaattagagtctccagaactgtattcaactttaaggttttataactcagtaattgaaaatcatcaatccagcctatactaaatcatggccaaatagtcgattatataaaacaaaagacttttctttctaaatttcacccatattattgtttattataagatagtgcttttaatgaatttttcttatgttaaggtaaatgttttcagaaaatatcccttaacatttctgaatttatgttctgaaaagtaaaggaataattcattttcttatgtataaaactcaatatgaagcaaaagaaaagctatttgcatggattgtcattaactgaaagctctttaaccaggtcagtgaggatttaatttcaatttcagcagagaaaacgtttctgggtttcatcagtgtaaaacagcatgctcatctgaagagcaggtttgacacatggactcttgaattgtatatgaccactacatttcaaagtcaaatcctctcagtttggagtattcatccacactctacggaccagaaatactcagattaggaatgttatccacatcacctcgaactataattatttcagaaggaagaaaagaaaaaataaaagaaagaaagaaaagaagaaaaagaacactccagctttaaaatgtacacattttagacaaattactcattgtaggtggctctagatttaatatactctcctttcctaccatatgccttcaagacatattttcaaaagagtagataaaaggacaatggtcaagacaagctaaataatttatttctattcccaaattatagggatctgggactgataaagttagaacacccaaaataagaatgctttattaaaaataaattaagggtcgggtgccgtggctcatgcctgtaatcccagcgctttgggaggccaaggcaggtggatcacctgagatcgggagttcgagaccagcctggccagcatcatgaagccccgtctctactaaaaaaaaaatacaaaaaattagccaggcatagtggcaggtgcctgtaatcccagctactcgagaggttgaggcaggagaattgctggaacctgggaggtggaggttgcagtgagctgagactgtgccaccacactccagcctgggcatcaagagtgaaactccatctcagatagatagatagatagatagatagatagatagatagatagatagataaataaataaataaattaattaatttagcttgtccgcttcaatcttacttatatgtatgtgtatatatagatgcagttatcatatatttatatgtatgtctaatatgcatatgcatatatttatacatgcatgtacatatgtgcccacaaggtgaaataaaaattaaaaatcctacagaatttcatgcacatgtatattataaatatatatatacacacacatacatatacaaacacacacatatttattgttagtaatgatttcatatcattttacaaaagcttgcagatgctaactcttttactattgtcacatttactgagttatggtattatcataggaatggtatggaatgtttaaacagtcatgaccccggattattaggtatacagtataaatgtgattgctgtccaaattctaatatgggtaattacattctgcctacctcaatttcctctgcagtttcaattatatataatagggttctgtgctttctatgccaaaatggtacatactttttgtgtagtaagtttaaagttccattttttaaagatgttattttttattaaaattaatgaccaaaaaaccctttaaaataacgtgttttcataaagtgttattgttctaatgatcaataatttatatattataatttaaaaagcctggatttttaaatttgtaatgattaccacagatgtcctttccatgacatcatcatcaaaattaaatttttgtcagttatttctttgtgttttaaaagaagatctatagaaaaatactataattatatgtgaaaattttgtgtttaaatttttattttaaaatttaaatttataaaatgtacatatatataaaaattgggcaccagacttttgttaactatttgagctatactgaattcctgcatttaagtgttatagaaattaaaagttagccaggtgcagtggctcatgactgtaatcccagcactttgggaggcctaggtgggtggatctcaaggtccagagattgagaccatcctggccaatatagtcaaaccctgtctctactaaaaatgtaaaaattagctgggtgtggtggcacatgcctgtagtcccaggtactcaggaggctgaggctggagaatcacttgaacccgggaggcagaggttgcagagccaagattgcgccactgcactccagcctggcgacagaacaagactccctccagctaaaaaaaaaaaaaaaaaaaaaaaaagaagaaaagaaaagttataatgaatgaagtaaaaagaaaaaaaaagacctgtaaaaaaaatcctatgttgatatataaaaaattatatttaaattttatatttagaaatttataaaatttatatatataaaaaattgggcaccagatttttgttactgcttgagctatactacttcctgacatttgagtgttttagaaattaaaagtgataatggatacagatatctagagtaaaaaactaatttaatttagtgaagaatatggatacagttcagtttttgatttttagaattgcttttattttttctatatggcatttttttttcattgtggtctatctttcattatggcttcctctttcaatcctgtccatggagaacaacctgtgagattttatgtaaggagactaaaattttagtatcagttaactggatatgacaccgtcaaacatgagctaccattagaacatgatcaaaggataattctgcttactcttttttctttttttttttttaaatttaagacggagtctccctctgtcgcccaggctgcagtgcagtggcaccatctgggctcactgcaacttccgcctctcaagtgattctcctgcctcagcctcctgagtagctgggagtagcctcccaccaccaaacctggcaatttttaaaaagcattttagtagagatgcatttcaccatgttggccagacttgtctcaaactcctgaccttaactaatctacccacctcccaaagtgctggggttacaggcgtgagccaccgcgcccgggcctactcactttttaaaatctagaaccttttggcacatagggttgtgaacaaattatttactttgtttatcttgttacaaaaaggctttaaaaagtggcttacaaacattaaaataagaatagttaaataactaaaaagtgaaaatgtaaagtttaagtagagaatataaaatttagttaggagtgaggttagcattgaagatatttgccatgaggggatatatgattggagtttggttcactatagtctacctacatggaagaattaagcaaacaagaaagacctaaaacatatgttaaaaccacaatagcttcagcttggctgggtgctgtgactcatacctgtaatcccagcactttgggaggctgaggcaataagaccacttgaggccaggagtttgagaccagcctgagaaacatagggagaccctgcctctacaaaaatacaaaaattagctgggcatgatggggcatgcccacagtcccagctattaatattcatgaggatgaggcaggaggatggtttgatcccaggagttcaaggctacagtaagctatgatggcaccactgcactccaccctgggtgactgagtgagaccctatcttaaaaacacatacacacacaagaaatggcagctccagattgattcactatagcctagtaaatggacataatccaaccatggtatctaggaggaattattctctacttctgtgtttgtgggaagaaaatgaaaaagaattaagtataagactgaactatagtcatgcatcacttaatgctggggatacattctgagaaatgaatcattggacagtcttagagttgtgcaaacatcatagaatgcacttatacaaacctagaggatattgcctagtatatacctgtctatacagtataccctattgctcctaggctatgtacctgtatagcagattactatattgaatactgtagacaactgtaacacaatagcaagtatttgtgtgtctaaacatagaaaaggtacagtaaaaatatgatattataatcttatgggaccaccatcatatatgcttgcggaccaaaaagttgttatggaggtgaatgactgtactctgattatctatcttcagttctttacatttcaatatcatggccaataattttactttacttttcaatatattttaaaataaaataatagtttccttatttacattaatatataattttaattataatttaattataaaattataattataaaaattattgtaattataattttattatgtattcatttatattatattaatatattatttattataaggtattatttgttatttattatattaatttttatataaatataataattttaactgtaacattaaatttaatcataatttaattattgatacataatttaattataatatataattatatataatattaattaggagaagactttgcataaaccccaacaaaatagacgttgaattcaaaatatggggaagctaatatcaaatatattggccctacattatatgtttttattttcaatcgtaattatatattatgagtcttctcttctttgttcctgtcatacatcggcgttgcaggacaataatcatagcattaaagagtatggtattatattttgttacaaaagcttctctgaaaatgtgtcagttgggccgggcgccatgtctcacgctgtaatcccagcactttgggatgctgaggtgggtggatcgcctgaggtaaggggtttgaaatcatcctggccaacatgacaaaaccccgtctctactaaaaatacaaaaaaataagccgggtatggtggcacatgcctgtaatcccagctacttgggaggctgaggcaggagaatcgcttgaacctgggaagcagaggttgcagtgagccgagatcgcgccatttgcacgccagcctgggcaacaagatcgaaactccatctcaaaaaaaaaaaaaaaaaaaaaaactgtcagttgatactgtactattgattatttgtttgttttttggtctacaaaagttcctgattccaagggacattattctttttctccctgaaaagagaccagggaaacattaaaagaataataaagaagactaagtagctggacagttctgatctaggcacactcaactcagtatttgggattttcagtcagtctcttgattcttctgcatcttggttttctcatctttaaaagtatttggttaggatggtgattgctaaaatcctcttcaactaaggtgttttaatttcattagaagcaacacattattgagaacaaattttatcacatgagtttcagtgacactcgagaaaccttagatattgtctgattctgaaataaatttatgttaaatacaaacatggatcaagtaagcttctcctccaggatctagctaggttattaagaaatgtttcttagcagtattatttgaagtcttcttatatagacagatattgtactttctaagccgtatcaactgtagaaacattgctagatacagtaccctttaaaaaaaaaactcaatctctaaaaaatgatgaaaataatttacaaattagattattttagaaaacaatgacatttatgtagtataacaaccattatgtctcactcagaaaaaaaatttggggtcaatcaactattgtctctcaccattgctgtggcataaacttaaaatgtatttcattagacttgtcattaaccgacttcagtatcctaagaaccatcctccccttggagaaaaaatcatgctttaaaccttctatcgttttttgtcattcacatttttgccacagcattttctggatattgcatgtccaagtgagatgcagcatttaacgtgaccgtttgcacgtgatcaacctggaaattttacagaagttacacaaatctgaaagtattattatcattgatggctacaatggtgtcctaaagatttgtagatgttctgaacactacatcctattgcttttcccagccccctgctgcactgaaatttaatccgttttctgtattttttgaagcagagctgtcactggcggtaacatacttttgcatatgcatcagtttggctctagtacagatttttgttcacactggactcctactgatatgcactgatacaaagtctaaaaattacatttaattttatatagcttataagtagtcccagagagtattggatcctaaaagctaatatttttcagacataatcagcaggaataggtaatgtattaccattagtcacattagcagcaattgtaacaaaaggaaacagtaaacataaatgctctcagcaacttcattctttacaacgaatattaatataaaattacacaaattagagttgcagtttaacattattcaacatgtttattcataatgattgtttcacatttaaataacaccaaaatattgtgttttgtcagccaaggacaataatagtttaatagtaatttattttaaacagctactgataatacaaccaatcaacacattaagtggtgccaacattggcatcttgctaaataatctctagacattgcacacagagtacatctttcaaagataagtcaacaagagcaatcagagcagaaaattagaatttggtatcttagaattaaaatacagctaaagttttaattggggtgatctaaaagggcacttgatgtaatgatctctttcatttgttactaattgtttgttcctgacgaagaagaagcctacacaggaatgttgttgaattgagttaagatggcagtttccttagcagctatgttttactgttaaacaaaagagtggggaggggcaacctgccacggagaaatctttcttcagcttgtttcatatcacaagaattataccaggagattcagggtcaggtatagcaaatatggaataatttgtatgtggtcaaaagagaataaaattggcttacagcaatgctataaactatattggtagactgaagtaaaactatctgtctattgcgcttacaagtcaagctggagtagaaattcctgattcgaactgctcacaatgtcttcttgcaagggagtcacatcctagagtacatctacaaatgacatcaactttcatctcattttaacttcagttgaaaatttcagtctctgacactcacagaccaaggcaaaatatcttctacttcaaaaactcattttgtattgctgaattgaagagaagttttagctctaatttttactagtaactgtttcaaagtatcttaggagagaaaacagagaatgctttttatatgtttaacatatttccatatctaattttcaagaaccttaaaatactgctaatttttaaaagcatacagtatgtcaaaatatatacatatttatatattcaccattagttgtatgaataaactttgctttctccatatgttcttttaaattattatgctgtctaatcatttcctagaagttatcctgagtttattacaaccatcttgaatggctttttaaaaagtaatgcactactaaaccaagttttagatcgcttaaatatattacgtatctcaagaaaaatgtagcagtactataattgctatttgtgaaattttaaaatctagtatatagtaggcactttctgggccctgggggcatagtcctgaatgagagaacatgtctctgccccagagagcttacattttaataaagaagacataacataaatcagtaaacaaataaatatatgtcaataccacataatgatacattctatgaagaattttagggagggagtaataagatacatttggagatagggtagtaagagatggcctctcttgaatggtgactttgagcaaagatgaaatgaaatgagggtgtgagccatgcaaagatctggaggaaaagcattcaggaagggaacagaaagagcaaagtccgtgggggcagaaacaaattgttgcattgaggaaccaaaaggagaccattgtggctatgtgctcatggtagggagtgggagaatgagctctgaggagaaaggtgagcactgccagaatcctggaaggttgcataaaccatgtcagataattacttgtggaggagtttcagcctaatttccttctcagttcttattttttagacatgcttatgtgctgcccttatttagctttggatctagatattctaattagaatatctacttagctttggatctagatattctaattagaagcaattaaacctgcatgccataaatatttgtcttccgaaaatagtttaattagacttaggagttttatgctttagttatagtatttgttctagtgagtgcagagtgaatgcgaaagaattaggtcatttgatcactgggttctttgctttgaaaatgcttttaagtaatgaacgaaatttgctttgtattaaaatattaccattccgaatatcttctttgtacaggggctgttgaaagttgccatagataatgccagagctcaagagaaacaggtccaactggaaaaaactgagctgaagatggattttttaagggaaagagaactaagggaaacacttgagaagcagttggctatggaacaaaagaatagaggtatttccaaatttccagataagttaaatatttacagaaaatattaaacatattaatactatgatggtgatttattttgaaattgtagtatttttgttaatttaacggtagctaaagttcagagcagaatttgaatcctaggctcattgtatttcttaatctccaaagtacatgttttcttttctgttcctacctcaggaaattgaaatacatccattacatcattaattatataacttttattgattgttgagtttaaaaattcatgttctttaagataagaataaactctaatgatagccatgaagaaaaattttatgttaattcacaattgccctttgaaaaacttgagttaaactcataaagctaaaatagaaaatactgattattcaagtgaagcaggtttactaagatatttatcaactgaaattgaaaatggatgaatatctgaacaaatgaccaaagttaaatgtttgtataattttctttctgaaggcctcattttcatccaacaaggtcaagtacacagagtagaaactgatataaattcttattggataaaataatattattgatctgtgaactgcttcttttgtcacactgtatggtgcatctatagataattttgaaggtcatttatatttgcatgtttattttatgtatgaatttgaagattattttgtctacaatcaactgcctctttgcttcaactatgcatttaatatatatccaatataaatgctccacattattttcctttatatgtttgaaatggtcatttaaaaatagttgtttctattttgtctttaaactagcaggatttaccaggttgttttattagctattacgaagcaacagttagtgtattcctggaagttggtcattttgggacactgtcatctcagatgtatagcacagttctaaataatgtggcttcacatagattcaggtatttaaataatcaaaacaaggtaaacattgataatggctgtattccaagtgaataaataagttgggtcaaagaactcaatctatggaaccagcttccatgagacagccatgtttttattttgttctcacttaattttgtttagtccttttttacagaacttaaaagcaggcccggggattcctaaagtaaccctttggttactggagagaccttcagaattttattggttcaaaccttttgggaggatttacattctgttttctttcgttaaccactagagggcaaaacattcacagatcacaccgtaaagttcccatttaattaattacgaacagtaaattcaaggcaataactatcaatacttatctattatgaatgtgcctattgaagcagtgtatcaccctgaagagagagaacatgacgatcccatttggttcaatcatgtaggaggaaactgtgagcggtcaatggcaaagtgcagggtattaagcctttagagccacaagagtgtacaatccaaataaatatttcagaaattactgtttctttacaaagagactcataaataatcatttttggaaagggaaacagtaggcaggtaattttgttaaggtaagcacatgatttgcacaccattaaataagggaaattaacgtttaaaatcagtttcaatttcttttcgtataacaccatagccagtgtacattttgatacaaacaggtttttaaaaatatatgatacagcaacaatacacctgacatgtaaattagcttccatcttaaaaatattaataataggccgggcacggtggctcacacctgtaatcccagcactttgggagggcgagacgggtggatcatgaggtcaggagatccagaccatcctggctaacaaggtgaaaccgcgcctctactaaaaaatacaaaaaattagccgggcgtggtggcaggtgcctgtagtcccagctacttgggaggctgaggcaggagaatggcgtgaacctgggaggcagagctttcagtgagccaagatcgcgccactgcactccagcctgggctgggcaacagagcgagactccgtctcaaaaaaaaaaaaaaaaaaaaaaaaaaaaatatatatatatatatatatatataataataaaaacaggattatgtggaaattagaaattaaaactaaaatacttgagtcgttattattttataatttgattattctgctttaaaaatgttgctgttctttaatctgtagtaagaaatcaaacagtaaatatggaatgattagtcttcatgactaagagaagcattttctcatactgagtctgtcacgttgatatctacaatgtttatcaaccatcaacaaagataattttaaagaaaaatgcatattcccatatgctgagtagttaccatatgtatacatatatatgtagtaaaagttaaaacaattatcctccagaaaacatagttgatatacattttgtaaagaacagtagttattatttatcgagtatgtatcatatacaaatatttaaattgtccagttggagaaaaatgtttcataatcaactttttgtattatctatttttttaaatataaaaggctcattattgttaccagcagcatattattattagcaatgggggttcatactgcctcagatttctgcagagtgaaagtagaataattttcttaaaatatatcatagtactgtaaatttgctgtgagaaaaatattctcaggaaatcatcgtaacttcatccaaacaaaaacatttctgttctatacattaacaataattaaaagtattttttctagtgtacaaaaaatatttattacatttcctaaaattttaagaaagaaattattaaaaactgagttggtctaacattgctttccaaagcgtttttaggggagatgctccatttgctggtcaaaattgatgccctatgaggaaataggaaggaggcatgcttataagcgtttgcactatccaaatgactctgcactattgtgattcaaggacagagaactaagccacaaaattcatttaatcaagcttcctttatcagtgaatacaaacatttactaaaattagtttcctattaaatttatctttacatatggcaattaaagccattcttgtaatgtaatagttctaggctaaaataaaaattggctttcttattattttactgggaattattttagataaaggtggagatttttggaactttctttttataggtagactcagttcagcaggaaaacaaaatgaataatataaaaaatatagaccatttggaaattagcagcattatgaaaatttaaaaataataataataatatgcatacactcttttttagccatagttcaaaagaggctaaagaaggagaagaaggcaaagagaaaattgcaggaagcacttgagtttgagacgaaacggcgtgaacaagcagaacagacgctaaaacaggcagcttcaacagatagtctcagggtcttaaatggtaagagggtgtatattattgcatgaataactgtcatttttaatgcttaaaggacagtttaggcatgtgtttgtagttttgtatgtttctatatcttgtgattcattcagctatacttgaagctgaaagcagggtgggaagaacgtgttggggaaaatgccttattttataggtgcttccactgttttttactgaactccagcatctgggacttggcattacttctctgcttaaccagatttttttctactgaagcacaataaaatagtaatttgagaatttccgaaccccatcctcttttatgaacaatgttgcattgcttactgttcaaatcttccgaaaattcttacggttacagtttttgttcaacctttaaaagatgacaaagatttacgtaattttaattcagcaccaaagtaacaggttgctctttttttttaaaggacaataggaatcaaatgaaatatgtgtcactcttacctttctgtgcttttagactctctgaccccagagatagaggctgaccgcagtggcggcagaacagatgctgaaaggacaatacaaggtaggaatttgcagaaggctataaatctagatcttgctatatgagtttttcctcagctttagcctgctattcaagcatgtagcctaccatctgggccacatcaaaacaagttcaaacaaggtcaagttcatcttgcttgtttatatgagtgaattcattttgtgctgatagattttctttaaattaacaggtcatctctgtttatacaatgcaattaaaaggaataattaattttaaacaatgtatgatttaatcttggacacagtaaatgtgctttattgaatgtgtgaagcccagtctaatgcaggaagggtttataagttctgtgctacataaataaaatatgtggttaatcaaataggtagttcttacaatttaaaaatgtctaactactcatttttatgacagttactgcaaggtacctgcaaaatagactagttgaatgttaacaataaataagactgtttagttcctatgtggattccaaatgttctgtatgccattatatacactttaataacacaaatctgctgagtaaaatcatatatagcataccaaagggagttgtattaaatgctcagaagagctaaatatgtatattgtcatgatcgtactattagaaaagaataaaaccagaaggtagcatttataggcaaacatctattccagacgacaaattcaacctaacaacatgaatactaaacagtaacaagagcatttgttttctatttaaaatgaaggtgattcttcaaagggatgcctaaaatgattaactgccataatcctcccaattgcttttattctgcattttaaactcaatcatttttaggatatcatatgacgttaattgtgttacttaatcagctccaaatatgtcattcttggcttagtgtaaaggaaatatacttttgtaaactatcatatgtgcaagaagtaacaatcacaaacttgaagaaacatttttgaggaaagaatggatttttttttgcctatatttattttacctgaggccattctaattaatttgtaaatcctaaggtttgaatcatatgttattatgagacatcttggatatacaagattaatgctattgtagatatagaaaaagatctgaatttttagagtactatggatttcagcacaattatattgtgtatgtgtttgtatgtatatggttatgacaattaaaagaatcctcttgcatcttataaaacttacatacacatgttcaaaattactgttaatgaaaaaaccagtcctctttatcagggacaatagcaccaacaagacaaatgcaaatatcagcaccaatgtgtacatgcaggggctattcacgcattagataatgtcaaagtggtctcagaaagcacatgagcccatagataagtgtgacatataaatcatctgatatacacagaatcctcaaggtggtcagaagtcaatctagaaaaaattgaaacaatatcgtcctgcatataaatgagagattcgttgttaatattaagaagtgattaaacatttttgtatggttgatgatataatatgtatgccacccataacaacatgttggttgttaataaggctatggttatttttgtttgaatttgtcaaatttacatatgttcaaacatacattttaatataggtaaagtcttgctgtatgaggctgaaatgttgacaactttcagtttccattgttgtgactgacttattctgaagaaaagttttaatcacaaattgctttccttttagtatccagaatcttaccagtggaggaatacagtaaacctatgcaccaacaacttaatggttagggaaacaaaacatttgtacaacaattatacatagtaatttaaaaccatatacacattttatggaattatttttgcctttaattgtaatagaaaatcctcactcactttattcattcattcagcctgtccattgttgtactggtcaaaatgtacagttgttttttaataaaacatactaactattcattatatttatcagataatatgacttttcccaaattgtaataagaaaaaacactgtcaatgaatctgtttctagctgttagttgctaaaagatattttaccagcagtcaaactatttcaagactcttaacataacagagcaaagagatcatatttgctattctaacaccctattcaataagctttattagccctttgaaatttttttctaacctcagacaaaattcatacatttggaagctaacaaacagaatacaattaactgtgaacaaaagcaatcaaagaaagaatactgtatttagttaaatgttgtctaaggacaagaaagggaaaggcaaaaaagaaagaaccagaactcattactaatttgtgaaacggtctatgtcatgccttttgggagccatgagcacctgctgcttcacaattcaagaatgacacacacacagcctctcacactcatcactttctctctccaactgtccccaagcccaggtgttatgacattctttgtattatttcttgctccaaatccaaccataactgaaattattttctattccaaagtaaactcaatttattgggaaagacaaaataagcccacaggttttttaattttttcatgtatttttaacatttctggcaataaataaatgccacacttggcccaagagttagtcacctagaagttgggcacttaaatacttactgcttgagtgctaagtaattacccctaaatatgcacctctgggtagactaaatattgcctcattggcattttgtatcaccatttctataaaaccacagaggtggacaagaggaatcaagaaagtagtttagaaagtatttctgaagaaagaagccctaaataatttacttgcattttcttaatgaagtaaatcagctcatagtacgcagggtagattctttattgctgattttcaaataactaggaattcatgaattgtaaaaatgctataagtacagaacagacattcaaaaattttaaaaaaacttcttccaggaactgaaatatatggccattaactctcttatgccttatgtcacacagatttatatggcatgatttgtgttggactttgaaaaatttaccctactcaagaatttctctaagatcttttgaatctataaagtagacagagttcataaaaacaatcatcgagcagtgttttgggccagtcagtaaatatccctcaaaacccctctggcccctacacatatatatgcacatacgcgtacattttatgtagccaaatctataacatgatggctttcttcagctaagtcgtcatcttattttattccttctccttaggcaacagcatctactttcatagtttccttcttttttctttttcttttcttttttttttgagacagagtctcactctgttgcccaggctggagtgcagtggcaccatctcggttcaccataacctccacctcctgggttcaagcgattctcctgcctcagcctcctgagtagctgggactacgggcgtgcaccaccaggcccggtggtgtttttagtagagacggtgtttcactatgttgaccaggctggtctcgaactcctgaccttgtgatccgcccagcttggcctcccaaagtgctgggattacaagcgtgagccaccgctcctggccccgtagtttctttaacttacatatttagaaaatttatagacatttttccaatccactcagacatctcttaagagctccagataataatatccaactttttatttggtcgactcacagagacccaaaagttcagtgcacaaaacggtatgtatcctctcccctctccccaagcctgcctttctccagtgttccttccctatggcaccctaatccatctagtccaatattgtcgttaatatgtaatgagggcagagtggagcgtgacatttccctccctcactccctcatcctctatgcccagtcacgactctttccctccaatctctgtgctcccatcatactggaagtttttgttgttgtttcacttctttccccacctattggagacattttttcttcttccttgcctttacttaaccaccccttaagtcccagcttggaaatattacctcaaggaacacttcccagacccctcactctcccgctgtggcaactccctgccccctgggactagttctgcctcttagaggttcttactacaccttccatttctccataggaacatctgtacatgcagttccttgttcaatgccttcttcttatctctatggtagctggggcagagcataaaccatgcatgttttgttcactgccatgttcctattgtctgagagagtatctggcacatagtggtgcctgctattccctgaaggaatgaatcagccatcgaggaattaggacctatgttagatcttgtggatatgaagatccttaatgttctgacatttctcagactttggttgaagagactgatgagagggaaaaatggatgacctaagaaacccagaattagaccgggtgcggtggcttacaactgtaatcccagcactttgggaggctgagtagggcggatcccaaggtcaggagtttgagaccagcctggccaacatagtgaaaccccatctccactaaaaatgtaagaaatgggccgggcatggtggcaagtgtctgtaatgccagctactcgggaggctgaggcaggagaatcaggctgaggcaggagaatcacttgaacctttgaggcagaggttgcagtgagccgaagttgcaccactgcactccagcccgggcaacagtgcgagactctgtctcaaaaaaaaaaaaagaaaaaacagaaagaaggaaacccagaattaatgtttatatgcaatagctgaattaacaggatgtgtttattcttcgtttgcatttttaactttattttcttcttttcacatttgacgtaagatttggattctataaatacttagatccaattttccattttaaattgatatttcacttaccacaataacaaaaagttcattttcaaactagtagttttttgctttcactttttaagtaaaaacaagttttttaaaaccaagaaaaataattgttaaaaccaatggcgatatagaccacagttcctctgacatcttagactatctgcaagttgtgcttgcaaaatcttgacttcacttgaaagtacaactcttttatttacatccaatgaccataatcaaaactgtttggctttttcttcttttttgactgatcttagatcatagaaaaccaaatattcttccaataaaaagacataaaagacttgccttcacattaaaaatcttttttctaatgtaaaaatatcttctttctgtttgctaaacatttgaagatacatgctgaattttaaaattattcagtttttcaacaaatatttattcaacgttgatgatatgccaagcacacttttatgtaactgctttaacattgggaaaggactttaagataaaataaatctccttattgtgcaaaagagggggcttagtgaggttggatgacttgttaaaagtcacactaagagtttattggagctaggactgtaagtccagttgctttccacatcttgttcttcctggttgcttttagattaggattgttaaattattcccttcttactcttttacaatatattattattgttgttgttatttgttttgttaacttacagctccaaagaatcatatttcatgtcattcttatgatgggaatttacatctttgagcaagcttttttttttcttaaatcaaatatgctgtcactcaatgaatttcctagtaatacattttctttcatttagacaggtatattaatagtaagtggaagtatttactcattaaaatagttaggtggattgggaactgaaatgtattgagcctttcctgtgtattctaatttaaaggcaagatcacctaagatcagaatgactgattaactttctcacagtcacactactagttaatggggtttctgggtttctggcattgaatcgagatttatgacttcaaagtccttgttgcttccaccaaaactttttacccaggcttacatgtcccttttataagataaccactcccaaccacatcactcattttagatagttagcttgttgcctcttaatgaccaaaaagtccaaaacagtgtactgccaacgaatgatatacaattgaaaaaatgtttcctttcctgctttttactttttcatcagccattgtgcctatattatgtttatagacacttctagacacactgggggaaaccccactctaagcaaagaaaataaagtgacagtgaaaaaattaagacagtaatcatatttagagaaaaaaatctacaacttaacatgtaatgaatttatgataaatttacaatgtcagcgacagatccaattttgatttaatatatgacatttggtgagcccctttgtttcttttgacgtatgcatttgaatagaagttgctaaatggtatcccaagactttcatactttaacagcactaaattgtatcctacttatacttaccacttttaagatctttatgaaagtattgttcaagtttgattgtcatataattgttaatgcacatttcaatttctaatatgacttttaagatcggtgtgggaatgggggttccttaggcacttctatggaagctaatagttaagaaatgctagaaatcacatctagactgaaatctctgccccattgtttcccccacccctttagcaatagcttaacctcaaaaggtcattgtgaagattaaataaaataatccatgtaaagcacttagcacatgctgggcaatagtttgtatacagttaagttttagatgttagtattaaattttattattacaatatatttactacaggtcttggcaattggtaaacactgaagctgttattacttttaatatgtaatttacttttccctttttgggaaatcgacttgtgtttataatacaatgttgaattattcccatagtaaagtgtttgtggaaatgtccaagaactttttaatgttacctaaccacgttttccatatttaaaagtgtctttatttagattgaaaagggggatgtgggggagaaggagaggtttcttagaaacacaacaaacaaacaaatcaggactaaaactgttttcggggctgcctgcactgcatattgactattgattagtcatttagaaataagtaatcaccatgggtattaccttaaaccatttttctcgatcttaaaatataaatattagaattatgttactatgaacaaaacaaaacaataaatttccctctagtcccttggcactggtttctggtgtttggcagcatttctataaagctaatcaatttaagatgtcactgattaaattgaacaaaaggtgatattgattgtaggcagtaagcaataaacggactattgttctatagttattataggtcattgttaactactcatttaactagacaatcagttattaatattaaacagaaagttttagcgatacccataaatgttaacattttataaaattttagaattttttttatttcagcataaatattttattcttttttatttattttattttattattattatactttaaattttagggtacatgtgcacaatgtgcaggttagttacatatgtatacatggccatgctggtgtgctgcacccattaactcgtcatttagcattaggtatatctgctaatgctatccctcccccctccccccaccccacaacagtccccagagtgtgatgttccccttcctgtgtccatgtgttctcattgttcaattctcacctatgagtgagaatatattttattcttttaaaaatatattttaaaaagtaatactgttttttaatgtaactggatatgcttgaactccaaatgctgaaggcctcttgtgggtttttgtgggaaattacttcttacataaattaaactatacgtgatatagacatagtaggcattgtttaagtatgaagctgctcaaaatagtaatagaatgtaactcattataattatttactatgtaaaaatatttaaatacattattttcgtagagctagttttctaaactggtccttacgaaaaagaaaccattgttattatatgtctgtgttgggacatttcatgaagttttgtgatgttatttcaattagacagagaaaatttaggcataatgattgagcttagtttgtaatatatctgttgtctttttttttttttttttttgagacagggtgctgctctgtcacccaggctggagtgcagtggtgcaatcacagctcactgcatcctcaactttccagtctccagcaatcctcccacctcagcatcctgagtatttgggaccacagacgttgtgtgtgagaatgcccagctaattttcatattttttgtagacacagggttttgccatgttgctcaggctgatctcgaactcctgagctcaagcgatccacttgcctcggcctcccaaagtgatatgattacaggcgtgagccgccgcaccctgcctggcatcatgtttttctagtaaaaataatgtaatagggggttggcactatgagagttcgggagataaattactttaatctgggaatatcaagaatgatggattgaaagtggaagtttagagaggggaagtagacatcgtgcaactaaattgccattaaatattgaaacagagagttattaacagaaaatataaatgtcttgttagcataaataaagttgaaaaaaataaattaagttggcttgctcataaacatgtttgtggttgggcttaaatagtatctggaagaccaatagtcaaaaatagtgatatatggaaactgggaaagatattagcaggggaccctaaagatcaatgctagatccattttgatttaacatcataattagtagcatggaagagtggttaaacagtgcaccggtgaaattcacaagtgatcctaatttaaaagttgtgacacatctctgcggtcagtataaacatgcaaaataaacttggggaatttagaaatttaaggaagaatgaaataagattacctttgtaagaaagaaaatttaattttaacatctgtttttaaagaatattaagaagctcaacaaatatcaatgatagtatatgcccacttacatctttttatggtactatagtaacaacaattagctgcggggctgaggggagtatcagacaagaggtagaaaaatcagctgcatttaaatttcatatatgtatttgtaccgatgatactttttactactatgaattccaaataactaggaagttgctttttcattatagtcaatacgttaatttttaagcatttttatacagtatagtattatcttcagatttatgaaaaatatatttataaggttttgctttgagtttttttaacctttattatcaagtgaaaaaaatgatggttcagttggagcaagttatccaattaacttgttcatcaaacatcatcacaacaaaaaatgtatataatgactacaaaagctgaagaaggttatcatttagtaatatagataacaactaactctaatagttcatattcacaaagcctgcttcctctttttgtattcatcccccatggtaaggatatcctagccatcttagagaaactttaagaaacacagtggcttctttaagatagagcataaatacaattaattttttttctgagaaatgttatacttcaagagtcataaaagtgatctgaaaatatttaagtaacagaaaaagaacccccattttaaatctgttcattacaatacagatttgtatgagcaaaataaaaaattggtatacaaatgcatggttatggaaagtgtgttattaatttgatagcatgtatatatttagacattctaagcatataaactctttgatataaattcttctttagaaaaaaacataatcatttaaactataaatataaaaatgcttatagtgcattatcctacctcccatggttagggacagaatgcagacatgccacaataatgttgttttatttctactgttcaaaccatattaatgagaacatcattttggagaactaattatttctatttgtcttgtgtcacactttctaattcccctatattagcacagccaaagcaaattaattgcttttccagtagttgaaccttgtccaagaatgagctcacattcccttccagtttccctgtttctgggagtgcattgtgtcagaaatttctcttgatactaaacatagtcttgagaatatctttacagatttctgtgtgctcacttgatgaaatttctaagtttaagtgacccgccaagaaagataaagttcttagctgcaagattatacatcaaaacagttaaagtgaaattaaaattaaatgaatgaatctcactgaagcaaaaaaagcagtaattaatggttcccttaattgtcttcataaaatatttgcatgggtctaatttgcataatttgcatgtattaattaatctttcaaaggaattttgtgctgagagaagccaaaaaatctctttgttttatttaagagctaatgaaatatttatcttctttaatgaacttctcatcttcattaaaataaaaattgcacaagtttgtatgttttaaatgtttttataattgaagtattcaaaaaatctctttagtcttacaacagctgaaaaacaaacatattattttgcattcagtatcattttaacaacagcaacactttaaaataaagaaagttcaatttcactttctcaaagatggcaaatcatatggcaaatacatacagcgatttagttttaaaaataagatttataaagaccagctcattttttttaatgacaatgttatttttatggctgaaatactgggcaattagagggtatgggtatttttctcatccatatgagaaaaatcagaatgtttaattgtttgggaaatggttcattggttgaaaatattttagctggttaaaagaaattagtctgtaaaaatctatttgttattattaacaactgttagattgactgacagtgtttcctggcagaaactacacagttctaactttattctaaatctatctgctaaagaattgcagcaggagtttctcctctcacaaactaagagatcataatgaaaaccaagagccgtgccttggaagggatgaaatccaaaatctcatcaagtgccaaatagtatacgttcaagggaactgaggaggaatggaaggagagagcctggaagttaaaaagacataagggaaaggatattggtgatctcttaatgggattgtttttgacacagcagtgtttcaggatattaccaaaaaagaacatcatctaatacttccaaagcaatttaaggtttacacaacttttttacaggcattatttttattgatcttcacagtaaacccattttatatttgacgaaactgaggtacatagatgtaagtcacttggactcaaactgtaaatccagaatctttgagttcctttgtctccatacgccttgcttcctacgtgacagcaatctttttatgtcatgagaatttatgaagtggctgtgagtgactaaatgttaaagtagataatgagggtggcataaatttatgaggattaagattcaaaatgcaaatatatagtctttctatgtaaagtttagtaatgtgataaaatcaattaaattgactttaagtttcctgtaggattcatctttagtaaaaaggcattttcattagcttgcatttttctcaagacgttttctctaaaataaaacaaagtttagttttctctaaaataaattcactagtttacagggataattaataaatcagttacacaataaatgccaatacagattttattttactaatatcgataatgtatttaaataactggttttaaaatgagtaaaattaacattaatacagtttagtgctaagagagtagtgctgaactgagagtaatagtctagtgtcaatactatcattcattaatgttgtgaccttggtaactcactttaactgctaagtcctgttctaacactgatatttttattctgtcaaaatggcaaagacatctactttgttcactgagtatagacacacaaacacatgcacacacacgcatatgtattcatggtttatgtgtgtgtgtgtgtgtgtgtgtgtgtgtgtgtgtgtgtgtgtgtagatagatagattctagacctggaattcctgggttcaaattcccatgctgctgttaactgtataatactaagtataataccaagtgtgtaaattacactgtttgatgttttgggttcctaatctgtaaaacaaagatgataataacattttatttgtgaaattgttatgaagattaaatgaattaatacacgtaaagaagttagaacagtaactggtagaggccgagtgttgaaaagattttgctatttttacaattatgcacaaatttaatgtaatagtagttgaaattgtgtttatttttggtaaaaattaaacatatcttgcattctcctcagtcaatgattttttttttctgtatgtgatacatagctgttctttgaggcatgattgagctggaaaatgaaataaatattcaccagattttccagagcatttaaaaaattcatgacatggtgtgaatttcaataattacatcaattaaaacaatatagcacaaggagttttatttgcagctacatattatatataattatttatctctttcagaataaaaaataaactagttattgttggctcaaatttaagatggaagcattagagtgtcttgatttttctattatatttggcaaatttctcctaatatgatttgtattttcatatagtgtggagtaactgcagactcttctaattcatatataatcacactccagagatagtaaatctccaaacatagttccacttaagcttactaattacacctataaaacgatgaatgatggctacaaattattggatctgactttcattctttatttatttctccctgggagaaagagtgctggatggggagattttagaccataaattatttccatacatattcaggtgtgctatgtttaactttgatttcataccctggtttaacatttacatttagttcataaggcttatgaagtcatcttaacagaattaagaactaattatttgatttctatggtaaaacaatattatattaataattttgatgtctttattttcttagtggtttatactggttaatatagttttaggcctctcttgttccaaagtatcattgtcttttgactgtccttaccaaatttctccagagaagttatatacaatttcacaacctgggccttattcatagttaaaggatagtgatttggagagaaatttcactaatgagaaatgtaagatagcaagaatggaaagcactttcctcttctaaacccaatagatagtaatgagtgccagccaaccccaatgggaccataagcccagtagtaccatatttattctctaaaggaactccaaatacatatttatatgcaaagttgcagattcttaaaagcaatgtagaagcctgagtatgatgcgggcttatttatgttctctgataatagtaagagagattttttaaaacctctgaataaaaaacaattataatacagcataaacaaatttgaaaatagcagttcagtcataaataaaggaaaaagctcccaaagctcttttgaatgaatgcgatgacttctcctaactgctttgaattcagacttacttttgagataatattttgagggccatcttcctacatcttcttttacatttatgccattcagattaacaccattgtgttaggcacttaagtggtataaatattgcaaaggataaaaatgcccaatatttttattatgtaaattctaattattcttcttaaatgatttgaaggaagaacatttaaagaaattgcagaagatgccttaatttaaagggttgatttattatataatatagtagctaataggcttgtatttccctaagagttcaggacctagcctggttaatgtgtcaaagtctcaattacagaaaatagtgaagtaaatgtaatagataagagaaaaatatgttaatggaataaagtcacaggtttactgtttatcctttggaatacatttcttgtaattcttcatatctttgctggaggagaccccattgaggtttgtaacatatttgcacttactttccaagggttaccagcagtggagtcaaatgggactggaataagctttttctccatgttgtttcattattcatagatattttattgtagtcttgtaatgagattttaaaatacaggccaaattcaaccagtgacttattgctcctttttacacccactaatataacaaatgaaggcaagtagccctaatgctttgactggtttggtttcaaactagacagaaacctcttcactggctcccaacaagacaaccgtgtcaagcccaaatcaagggcacaggatggggcatcaacaccacccaatcatccacccagaaaacatgtaaatacactgaagaatatgagctgtcatgttaaacaatagaacaaatctcattttgatcaagagctgggaatagtatttagcttagtttctacatttcctcatctcgtaatttcacactcaccacaagagtctcaactgactaattccaaaaacactgataacatttatctacacagtgaaaatgttatgaaattaatgcttgagtggttataaatcaacacaggaaaagatgtggcgaattttctagaatgtttatatacttaagttttttcagtataactagatttttgttttctgtttctggtaagccatataataactgattttctaaactaatgtgtaaatatttagtttggtaggtaattgcctacttggatctcaaatgcagttcttggttgccttggtttgaacagtgtttttatgtatgactcttttctttgtgagaaaattagagcatagacatttatttaaacccaacaatgcacatagaagggctgtgaattctcatagcctagtggttcctttgcatgttattttataaaacacaaaaaatgcaaaaacctttccagtgattttcctaatggtaaaaatgcatagtcaacaaaagggtgaagttttatgatgcattacaaatctgcagacttttatattttaacacttgcagtgctttaacatgaaaaaatatgtgtataattttagcaatattaggtgactaatgatactttagatttatgagagacttgaaaataataaatcttgtttttcagtattggcaggatttatgatttctgaataaaatgagttagcaatgtgaaaaatataaatataaaatactagattctttcttctttgggcttaatttcagttttaatttcagttttaatttcttctctacttagcttttctcatctccctttgtataccactatctgaaggtctatgctttcatatggtttagctaataaatacaaaatataaagacatcccataaaaaaagttctggatgtttcaaaatcatgaatttaagttataatgaaacctcagaattgctcttctcatgtctttcactcaaataattttcatccattttctctcttcctgaaacactacaactgttataaaatcttcactgcagtatagaatggaaaaaatatggatgaacacattcttccagtatggcttccagactgctatcaatatactactctgagaattatcttatgaacagtttaagaggacaaaattttaaaatagctctttgtttttaatacatatcctcttgaattttcaaagtccatgtttagtattttaaagacaccaagatcctgcattaaagtactgcattaaaagttaagcatatttgacttattgaactagcatttcctaaaagtatctgacataaaacctttttattgaattaaaagtaataatatttcgtggaatgaactttggcaaactattgtccgtaactcttgttgaatctatctgtagcagccaattcactttaacaaatgcttatacactgaagtgcagggccaaaaaaaacaaaaacaaaaacaaaacaaaagacatatcctttctaattcacttataatctagtgggatatacagaaacaaatacttctaataaaatacatatttagttaattgtttttaatatagctgtagatatcaagatgttgttcagtgtggtaggaattttaggtcaggttttatttatataaaggtgtgaaatacttatgcattagattttattatatgaaacagaaacaattttaatgaatcaaaatatatcatgtgtatgtgtgtctaaatatttaaaagccaatatactctatacaatatttaggtagtcatagtttcaatttttctagtagaactcatttttagctttgttggctgtaagatctcacacaatattggaagcatgcatctaagcctaaaattgatctaataggtaaaatctaaaactttagaaattttgatattttttccctaagagatgtaaaaggtctagaattctcatttaataaagtatccactttaacccagtacttctgaaatgcatataaattgctttcagagtacaggcaactgtcagagtacattccaactggctgattgatgaagatttatttaagtcaagatatgtaagtctagatcttttgagaagccatattattaacatattttgcaaaatttttgcaaacaggaaataaataaatatgattgtttctcagtatggaattggacagattcacaaataacctttattaaagttaaaatctggcctctgctgttttttttaaattctgaaatcaatatagtaaattctaaataatatacacattacataaaaggtattcatataggtgagaataaagaaataaaaaatgtaattcattcagaaaagaggtaatgagtgttcatcttttggtattcataaggaatagagtaagaaatataaggggtaagtcaaattgtagtactaagaaaatgcaaaagccaaatggctgtgtttgaatttcataatctgggaaagagatccaggctaatgtagatgatgatgagtttggcttactaatatggggtgtgatgtgacaatgtgtcatttagatacagttgtagagtaagcacctcaggagatatgaagcaggcattggaatgtgaagtccagatgagagacacaactttggacataattgaagctgacaaaaatctcttatattgaaaatatagaatctctttgcataatcttgattttattactctgagaagtgagtcaagccactctccacttcatccttccacaaagaaaagacagtaataagagcaacgaaggcaacatttcgaagcaaagtatgttcaaatagcaatgagttaaaacattttgtaacatgttacattatccttgtatgaaatgaatgacctaatagtttttagaaatggataaaacataaagcagctttttttttcgtgggagttagaaaggatggatttgaattttgtccaggaaagtgagtgtaataaaactgggaccaagaaatttacagtgttagattatgtacatgaaattagaatagtgaatgataaaaatacatagtgttatgttagataattcatgttttgacttagttattttgcatctttgttgattctgcagattttatctatgacaaagtgtcaattcaactcttgcattaagagacatgtatttttcatgatattgttccatatggcaatatgttggataccagtcctttcaagtaatcaaacttacattgaatagagtcataaacaaaaaagcaacaataatttactctcattgtaagcttttccttccgatgcatagatattttttgcagtcatttgaacagtataatgcattcttattttgatgaaggggaagtaaaaattattctttagtcttggtaaataaagaaaaacgtgctcatgtaatagtgtcccgatttatcacaagaaagtgtaggttataccaaaataatactattctcacacgatattttaagctttaggaacatcatgatctcttatataaaatgcatttggtaatagagtcatcaagtgtctagggctgcaacgtttagaatttttatctgagcactgaacttgtaaagaaatagagctgttacagatggctatacagctttgaactctttatacaggcaccacgatgctaccaaaacctgacggggaaacagccaacgtttattatccaagacatagaagttaatattcttaaagccatgcaagtaggttttcctgagaagaaatgaaattgaagtctgtccagttgaaatcaatgtagatgaccatggattttaagataaaatcagcattttgcattgaacagtttgctatcgtccaagtgcaactgtgaattagccctaaaagagtggtatagagtccctatggtgggaaaataaagatttttattataaagtggtttagaactaaggctagatgaattccttaaattcataatgcttctcgaaatctaaccttaattcaggatataatgatctacatggtgacataagttaattttattcatgtcacaatcactagtgatgggaaaataaggcaatactgacagtaaccacagccacaagctattaattttaatggaaatagtggcctatgttaccatgacccagggcagaatttcacaatgggcatgaaatatacatatatcagcatttatcttctttctaaatatatgcacatttattataatatactttgcatgtttagttgtagagtttttgtgtttattttttgaaattatattaaagaagtttggcaatcttgtgaaatttaatatatgctgagaacaaaccggaactttcaaaagatgtaaattataagtccatagtgctcagatgtttcctgaaattctttgtttctagagatagagacaatttgtaaattgcaaaattatctattagcattacagttttttgtaataggacattttgcctttttttgttgttactgctttccattttagaaagcacttagtgtcttacatttgttattgtttgtgaccagtttgttgatcttttcatgagcaatttgcaaaggatgaggtctgtttccttagaaaatatgaagtatgataaacaatagctttaaaaatggtaagataccagatttaactgaaatagatctcagccaattacaatcactaaatcaaaagttctcaggaacactaaatatgttgccttgtttcattcaatctggtatctttttagatgcttttaagggacagatctagaatgtggttttcctcttttgctttttgtcagttcattaaactgtaacaacttcagcagtagggagctaaacaattgcctgggtaagttctgtcgcagtccatctagttacgtgatatgatcattattattctgagatatttttgatctgagaattaaactatttcgaattattgtttttatttctgagaaggccaccagatatcatgaaataatattgctctttaaggaaaatctgtttttattcccagtacaatcaaagcaccctaggataatacaagcaaattatttccacctactgaagaagatatatataggtacacatataggtagatatggatatatctatctatatctatctgtctatatagactccatatatggagagatagatatatgatatatctatctatctctatatatggagaggtatgtgtgtgtgtgtttgtgtgtgtatgacaaaacaaatcttttaaaagtgtgaaaataaatagtttgtgatttagaataatttatcttttcaatagcaaatcagatgtttgttttgatttttgcacattaagaacaataaatgttctgggaaacatgcaagttagccttgttcctctgaaaggcaggcaggctcctaggagaaatcaaaggcagcatttggtttggtgagttcacatgatctggaattatgttagcaatcttctctgtatttcagaagaaagcaaacagaggtactaacacactaaaactcacaagaactaaaatatttacctgtgacattgaccagaacatcttttctatcacggaatgactattagtgtcacaacaaattacctcaaaacttcatggcttaaaagaatatttactacctcacagtttctgtgtgtgaggaattggggactagcttagctgggccttctgctttgggtaccccaggctacaggaaggtgttggcaggcctacagtcatctctagactccactgagggacactccacttccaagctgactaatgtggctgttgccatgcctcctgtcctcaagagtgctagactgagggcctgggttccttgctggccattggccagaggccaccatcagttccttgccacacggtactctccacagggcagctcaatacatggcagcctgcttcatcagatcaagcaggtgaatagatctggggaagaagagtgtgcccacaacttgcaagttaccgtctttttagaacctaatcttgaaagtgacatcccatcattattaccatattctcctcattagaagcaagtccctaggtacaacccacacttaaggagaaggtatcatgtatggctgtaattgtaggaggcagggggcattgctgatcatcttagaggatgcctaccacagaaggctcttcagaaaataaaactgtccagttccctagtgagaatggaatcagaacaaggagtgtgatatattcctactatttaatggattcaggaatatatctaaagacagagcagatgtccatgtttgtctttgaaagtaacatcatccctgtctggtaaatttgcttgattaactgctttctccaggcttcatttcagggcaaacattctattgattctcatattcttcctttagttatgatatttctgtcaatgtgcttcttgcctgtttgctagtcattctttttaatataacgttgcacatctttgaacttatctcttctgtgtttttagtgcacagagggccaccttacttaaaagttcttgtataggatgttattgttctcacccatatactgtctaaatatcagttaatgatttcattaggtaagatataaagaaaagttatttccctatgaaagtgtcacttctttagctaggaaactctcatatttactgaaaagttttgagagctctttcattgaactttgcctgtcatttgtcaagttgaacactgtcagaatctcagctcagctttttgtaaacatattaaataaggctttaaagatgtagaactttattcacccacagttacctccctaaacaagtataatgtttattaaaagtaacaaattagtcatgttggagaaaatagaaaaaaagtagaaaatgctgaacttttaaaagccagatgatgagttttttttcttccaaacttagaagaaaataactaggctttgacaagagctgcccttctaattgccacctctggtttttttcttagagataacacataaatttattctgacatctcaatttattcacaggattttgtctgtttcttgcagttctgaaaagatataaaggcttgaaatgaatcaaaatatccctgttttccttctctgtagcatcttatttgatcaaacaagaaatcatttttcttctatgctgtgttttaattaagtatattagataatatgtccattcattacttaggatcagatttgcacttatatgattatttccttccacccttgtttcttagtcttctttccctcagaaaggaatagaagaatggagaaagtaataagagatttctttgtctttcactttgatgaaatccagaggtctcacctcccaatcaggacaaggtaacctaagtgcaaagtaccccattctcacttgctggtacattaaccactctgatgacttcttgcttcttactaatgaatatttaattagaagacacacacaaaaatactttaccaaagcatttctccagcagtataaatttttttctttatttataaaagcaaagcaaaactttaaagagggcatgtgctctgctttttgtttttgtttttgataagcttttaaaagataacttaatatttatttcaaatagagtcaaacagaacagtaatttcttacactaacaaatgcacattgcatatgcagtcctaactcagtaacaggtaatagttaagcagacttcataaactttacaattgtaaatttgccattaaaacatgatagaccaatagactagaatctagctaatgtccacaccctctgtcgagtttcaaacctggtatttctggagaactctgttaagaaaatcatgaaccatttgttttctacctaatacttgaataaacttctcaaaaacctcattgctaagcaggaaaaatacttatcatgagaacactgtccgtatgaccagtgaaacagtatatgtggatagtagaaagggtaaatctttaactagttattaataaatatctgatatagctgacatattgaaatatctgatatagctgatgtaattttttttaatttgtgtttgaaaaaagaatttaagctaggtgcaatggctcatgtctttaatcccagcagtttgggaagcagaggcaggcaggtcgcatgagtccaggagtttgagaccagcctgggcaacaaggtgaaaccctgtctttactaaaaatacaaaaatgagccaggcatggtggcacatgcctgtagtcccagctactcgggaggcctacaggaagatcactggagcccaggaggcggaggttgcagtgagatgagatagtgccattgcactccagcctggatgacaaagtgaaaccctgtctaaaacaaaacaaaacaaaacaatacaaaaaaacaacaaaacaatttaaacttagagaagtccaggaacagtgtaaaaactatcatgtattctttaccaagattcatcaattattaatattttgcctccatgtgttttagcattttctctgtctatataatattttctgaagcatttgagagtaagatgcacatattatgggcctttacctatcatctaatccatagttatttcagagtatttattaacaataaagatgttctcttgtatgcaaacacagtatatttatcagctcagtaaatatttcattgacaatactttgatctgatctgacatccaacttccaattttgtcatttgacccaataatgtcctttatagcatttgtttcccttcattactgaatctaaattagggtcacgtgctatatttagttgtcatttctctttagtctctttaatcttgagcattttcttagtcttttaaaaataatttataaaattgacatttttgaaaaatacagtccttttcttaatagaatgtttctcattttgcatctgatgtttcttcatgtttaggctcaggtcaggtatgctaagccaatatactatcccagtggggctgtgttcttcccaaggcataacatctagagccacataacatccatcttctcctcattttgtggcattaattttgatagttccttccatatatttttattgagccctttccatgtaccaagcaatgctcaagatgctagaaatacacaaatacggtattttatctgctcttaaggagatttatagccagtctttcagaaatttctgtaggatagtgaagcattatacttgtcagtgtaagaagacaacttgggagagatgatagtctgggtcctatgccacgtgcataggacaggaacaacatttaggttttagcaatgcaatatatgggatcccaactgtgtgtacatgagtttaggccactcattcgtgactaaaacactttgtcgaagggctttcttaacattaatcatataattgcctgttctttgttgcatagacaaacaatagatagttgacgatgatgatgatgattatcatcatcataattttttgttaattttgcttggttgttgttatggtaatacagttttaagaacattcagttcttgaacagatttgagttcatagaatcacaggatgcagatttcgaccccatttggggcagatccttgagtacagactagaatatcattaataccctctctcttaaccttcatagaacagaatgaagttagggctttcctctggatgaggttgtggcttaagggaatgtggttggtttgatcttttattcagaaccctcaaactttctccatatcagcaataaggctgttttgctttttgttatttgtgcgtccactagagtagcttttaatttccttcaagaacttttgtttttcattcacagtttggcaaactgtgcaagaggcctagcttttgttctgtctaggactttgacatgccttcttcaccaagctgaatcatttttagcatttgatttagagtgagagacatgcaagtcttcctttcatttgagaccatggtaagattattaattgacgtaatttcaatattgttgtgattcagggaatagggagccccaaggaatgggagagagatggggtaatcagttgttggtggaacagtcagaacacacgcaacatttattaagttcatcgtcttatatgggcatagttcgtggaacccccaaaacagttacaatagtaacatcaaagatcattgatcacagatcaccaaaacaggtataatcataatgaaaaagttgaaaatattgggagaattaccaaaatgtgacacagtaacattaagtgagcatttccccagtgcggagttgccacaaactttcaacttgttaaaacaaacaaacaaacaaacaaaaaaccaaaaaaaaaaaaaaagtatctgtgtcccacaataaaatgaagcaaaataaaaggaggtaagcctgtaccttatcaaactgtgttttacagctttagatgatctcttgttctcagaacattttttcttgttttagggtacatgtgcacaacgtgcaggttagttacatatgtatacatgtgccatgttggcgtgccgaacccagtaactcgtcatttaacattaggtatatctccaaatgctatccctccccctccccccaccccacaacaggccctggtgtgtgatgttccccttcctgtgtccatgtgttctcattagaacatgttttcaactaacctgtgttctctcatgtactttcttatttgaagagaactgaaaaaatatataaaagcggtttgtgattacaattttttggtctaattattagccacaatcaagaactttacttcataccagccttttttaaaaaaatttttaatgatgcaataaattcgtttactttaagctctgggatacatgtgcagaacatgcatgtttgttacataggtatacatatgccatggtggtttgctgcacccatcaacccatcatctaggttttaagccctgcatgcattaggtatttgtcctaatgctctccctcccctagcccccaacccctgacaggccccagtgtgtgatgttcccttccctgtgtccatgtgttctcattgttcaactcccacttataagtgagaacatgagcataccagccctttttagtaaggcacattatctactctgatttcaaataagcaaggccatgttggtctattatgtaattcattacctatttcttttctttctttttttttcttttttgagacagtctcactctgttgcccaggctggagtgcagtggttcgatctcggctcactgcaatctccgccttccaggttgaagcaattctcctgcctcagcctcctgagtagctgggatcacaggcatgtgccaccacgccccgctaatttttgtatttttagtagagacagggttttgctggtctcaaactcctgacctcgggccatctgcctgcctcggcctccgaaagtgctgggattacaggcatgagccaccatgcccagccacttcattacctatttcttattgtggtgtatttggagtgtacagacaaagtaccctagttgttgtactttcctgcacacagtctttgcttattgtctagaacagcacccagtgctaatggaaaaagcatataaagaggatatgaggtctaatatgatgtctagtcctctctcaccttgacccaactctgtaggcctcaggttccccagttacaaccttgaaaaaaaaaaaaaaccacagaatctgttactactttttcagtttttactttttaattatatttaaacacagctttgaatatattagtcttcaaacatctggaaatcacttgcactgttattatctgcatttcatgagaagaactgataattattcagtatcctcttataaatgggcctgtgcagaacatcagtctcactaaaatatttctcatgtttaatgtagactttgtgtctctgctttcttgctttagcagtagcagaatgttcttactctaaatataaaattataaaaaaagcaagaaacaatattttctttaattagcttcttcctttgggggttttagaagaggggttatgacttgacaaagatccttcccatctgttcctgtttgtttgcttttattttgacttcctttcgttgtcttatcaaatatcacatgaatcattaacatttgttttcatcgcttgctttggtttcctttacttcacatgatgaagacattatgttgagagacacacacggctactatattttatattaacctcagattctttaagtaaatattaaactttctggacatgtgatgtgatatgtttgccctctgctgtgttaatattttcctcagctctggaagagtgaggcatctgcatgtacaactgttttgtgaaagcagcaaatatccctagattacaggtgcctggatataagttttgaacaaatagttgacctgtttaataaagctacttcctaacagaaaacgcaatttattaagtccttcgtgcaaaagatgtgtaaaagatccttgtggatgtttgtgagggagttcttcccaaaactggaatagaaatctatttgcatattgtgtgataccttccacaagcatactccattgttaaggattttacatgactttcacagtgaacaaattggattttttggtgtcaatttgaaattgtattaatttatatgtcatcttcttatataaaatcttgtcacataatgtgagtgggtttttttttttttttctccaggctggagtgtggtggcgcaatcttggctcactgcaacttccgcttcctgggttcaagcaattctcctgcctcagcctcccaagtagctgggactacaggcgtgtgccaccacatccagctaatttttttgtatttttagtagagtcggggtttcaccatgatggcaggatggtctcgatttcctgacctcgtgatccacccgcctcagcctcccaaagtgctgggattacgggtgtgagccactgcgcccggccatatgattggcattaaacaaacttcattagtttttaaaataaatgatcaatctgttcaatactctagtttttatatatggaataaaagctaaattccacatctgtctatatgtattagatgttagcaataacttcatataataatacattaaaaaatattaaaccaaacattaaacttaatccatgaatacaaaactagaaattttgagatagaattctcctgtctgtctcctcagacacagtgaataaaatatctaaaatctatatacttactgggtctgatttgatggttgcaactgtagtattaaaatctgagatccatttttacaaataatttacaagtttttcttcaatttattttctgtagatctaaatctgcatagtaacaaacagcatacaaaaattcacacgcacaataaactattcagtgatccttcttatataccaaatgctttcttagacacgagatactttcttatacaccaaattatagctgtaagcatcaaatcacaatgaactttgaaactattaggaatttgtaatttaaatagtttcgctcaatccctactcccaaatgcttttaattagaacagactttttaattaagtactcccatgcacaaagtttagcttgatgacttttctgtcatatcaacctcccatgcaaaagcaaataatcattgtgttaaaggaaggtattttctttgaaactacgctgtaagaattctagttctgatttcagtttgaccaattgaggctttgctgactaaaaagaagccctgctcccaggaggaaggcaaagagcagatccacaaggcagcgagacaaatggtactaggtgtttaggagtcagtcctataattctgtatgtcaaagacatcatattttttccagggacagtccagttgcttattagaggaaaagtgatagagtggaatggccatgaaatttgaattcacagaaatgtcaaatcactgcacttccatttgctagctctgtgaaaatgtgcaagatacttaaactctctatgccttaatagccttatttgtaagaggcattattttcttgggttggtggaaagtttagacttaaaatcgatatagcacctttaacatcacaggtgctcagaaaatgttagctttactgatacgaatcattattgccagtttacttaatcttaatgtaaagctttcatccatttgagatatcgaggaataactgattggtaaacttgcctcagcatgaggaacaaacaggaaatatattttttctgcgtcaaacacatacagaaagaaccaaagacaatgtagaaaatggtgggcaggagtgagattatctagttagagggtaagtatgatgtacaacgagtaacctttaatataaaatgtatgaatcaaccctctgagttgtcagatgtaaacagcacacctccgaataatgaggcctcagctatggacgcactccagggattccaataatctctcttttgccgctcatttttgcaaagtcttctccatggcccatggcttttcttgctgtttgaagagtcaggaaaggagagaatattgggaccattattatataacatacagacatggcacagtttgaattataggaccatatatccttcctagcacatttgccatccgcctttcattcaggtggtttgttaacagaaggctgagttagaaccacagccccataattcagaagcctgttgttagttccctgggtatgtccacatgcagctatttactgtgggctacagggccaatataacttctctggaacattataacatttgtttaaaattttgttcctacagacttttattgatctgcaagtatgttttaataaatatgacaaaattatatgttagaactgcttttaaaataagggtctgtaaatgaaagaaagatagtcagtcttcaagggtctgtctgtgcgtggtgcatttctgcctccggtggattctgaagtagaggatctctgatgtttaataattatttaatcatagagaactacctgaatgtgacaggtggggtctattttatagctgacatctttaatgcttgatacatttgtccatctgttaggaacattagccaaaaatttaataggagacatatttattaaaagtagaattacagcagatcagatactgagcacataatgtatgtaatttttataaacgtgttttatatagtacccatggtaaagatgcttatgaaatacttattactggtatattttacaaatctaagagagttttatttaaaatatttagttttagataaactttaacatttctaacatgctaataatttttgttacataggcatattaatgaatttctttcttcaaaagtttaacatttgaggccacactaaaacttttaatgcaaacaacaccatgctgaaggcttctcattctaatactggcagaaagaggcagctgcctcttccacggggcttatcgtgggggaggctcactttatatgacttcaaagtgagataagcgctatagagtaattcttagggtgatagtattgaggagtacttagtggagctctttgtagagaagttcaataggaggcagcagaaggggaagtagggagagagggtgtacttgtattctaggcttcttgaaggaagaacagacctgaatattccaacacaatatagagtttggcgtgctgtagaatagacaggccactaaacctaggggagggaagtaaaagataagactgaaaaggaaaagcagcaccagcttaggtaccactttgtagaccatggagaataatttggctagttaatgtaaatatgggtcttttaaataattattcatacttaaaagataatttgtataaatccatttttttgctcctggattctttctacttaatatactgcagatcacagatgattagaaaactatatttaatactttagttgcttttcttcattgtacagagacttaagagttccacagtgagtactgaaatgttacttttgagcaaattattactttttataaagtttatgaaggacttaggttaatgaaatttgaattctgtggaagttgacaaggtctcggttccctctgtttaatcctaggaaacattgcgtattttttaaaaaataagaatgggaatgataatctcaatataattgaatacatgctagaaataatgagacaattgaaaagagagttaagtagggataaataaattaagggattaagaattagaaagctttggcaaaagtatcaacactccatctttttggatacttctctattctctgttactagatttttaaacaaatcaatgttactttatgtagtagaaatcatttgaatcaaaattatctttagaacagtccaatttttagccaagtggtagtaaatatacgaaagacagaaatttttgttctgtttatttttataatattattaggtttgtttactaaataagtaattgaaactcctgctatgctgaaaccacaaataattatatattactcatataatgtaagtgagaaaaacatagtttggtcccacaggtgagcccaattaagctaagcaaacggaagaaatcaggccatattccatacgaaaacaataaatgttacacaatatgtcaacatggtactgccatatccttaattagaaataaatttttacctaaattatatggccttgatactagtatttgattaatacctgatttaggaggttccaatctttatttaataccaaaatgtctacagctgaactgcagtaatatttagtatcaatcagaaatgacagttaggggccaaagaggtaaaatccctttagactgcatatctacacatatctacagagagaattagacacagtttgtgcatgtctttacatcattgctcagaattagagttcagcaggattaaatacatgttttcactgattaatcttaggttatattttatatccaaacatgtatgctattttgagggagcagatctttattatgattattatatgtttcaactattaagaaaaatcctagtgtatgactgctgaactgaaaagctaagggtatttcttttttattttttcatttataactattattttttaatagagatggggtctcaccatgttgcccaggctggtctcgaactcctgggctcaggcagtcctccccgctcagcctcccaaagtgctggcattacagttgtgagccaccactcccagtcctgaaaagctaaggctatttagcaactttcaagtaatcattattattattcttaaagttgaactagattaattttaagagaggcaactgatatctgacacaacttattagcatttagccagtctgaggctaatctcatggacatccctgcctctgggagggaaaattgtggatttgagatgttcattatatgtttttatacttataatatatgtaattacatataatatataattacatttaataatatatataattatatatataattcaatatctactttgtgtaaaccatatgaaatctatatttttaaagacctatatctgattaatgcatttatttaacacatatttactaaacttacagtagtccctccttatctatagtttatcttcccgtagtctcagttacccattgtcaacaatagttggaaaatgttacagtattttgagagacagaaaggctacatttacataacttatattagagtatattgttataattgttctattattatccatgtagctataattgcatcattattatctataattgttaatctcttactgtgcctaatttataaattaagctttatcataggtatgtatgtatacaaaaaaaaacatagtatacatagggtttggtactatccatgatttcaggcatccactggcagtctggacatatcccccacagataagggaggactactgtatactctgtgcaaaagggaggactctgtatactcaatgagcaaaatagagtttcatgacatcttggaggtagtatttcaaccctacaaatgtttattaagatgttttattgcagcattattcacaatagccaagatttggaagcaacctaattgtccatcagcagatgaatgaagaaaatggtgtacacatacgcaatagaatactattcagccataaaaagaatgagatcctgtcatttacagcaacatggatgaaactggaggtcattatgctaagtgaaataagccaagcacagaaaggcaaactttgtatgttctcactttatttgtgggagctaaaaattaaaaccattaaatttgtggagatagagtgtagaatgatggttgccagagactgggaaggttagtgaggagagtggggagggagtggggatagttaatgggttcaaaaaaataggatgaatgaataaaatctaacatttgatagcacaacaaagagactatagttcatagtaattggtacattttaaaataactgaaagagactggattgtttgtaacacagaggataagtgtttgaggtgatagacaccccatttacccagatgtgattattatgcatgcatgcctgtatctaaatatgcagtgtatcccataaatataatatatgcacctaatatttacccacaagaattaaaaacattttttaaaaaggaaggattataaaaaatagaaaaaaatgagaggaatatataatttgggcttaccaatatttctatgaagtacgacatgatttaacattgctgatattaagttccttgcaacttactatatccactatagattgtataaaagtagttgtataaaagttgaaggtgaggtccataaatatttagactatcttttttatttcctgaatgtactataggtcatttatgttttcttatattttaattcttccagttaccagacattttgcaaacatttacatggcaatatgtacttttcaaagctcggaaaactttccttttctgattgttctcctttctactgtacatattaaaatttgaatttcagacatatattagacaaatatatacaaagtttaggccataccaggaagtagacagtttagagggtattaaatatttgagaaatatgcttatgtttggtattgttattgttttatttttggtttggacttttaatttcctatttcttattagtgcttcattcaaatggatttattcgatgtctctaagatttgatttccttttctttttcacacaactgtgtgtttgctcattagtaaaagttgaataatatacagtgtttacattttaatatttaattgttggatgaatctcacttcaaggggtaaaggctatagttcattgacagtgatgaaataacctagctggctttcatataaatagcaacgaatgtgcacaatagttacattacatggtatatttaacaacactgctaaagagtaagatgggagttcagtctttcctgatggagatacacctgagtgcattcagagaaaatttggttctgcaagcttgaaggaagtaattgttattcaacagaaatcaactaactttgcatatcagtaaaatacacacacatactcttagctattttctgagtgctctggaactgatatcaaaatagcaaatatatatttatgagaagtagaaatgctgtattcttttcagtcacataaactcagtgtaattatgaaattaacttaactttgagaagatatgaaaaatgttacttcttaaccaagtaaagatctaataaaaactacaaattttatatcaagttacatcatttttacatgcacatttgtaccccaaataccatgccattaattaatttttcactgttcatttctagatggaagactgtatttgaaaactactgtcatgtactgaatctttcctgttgaagaaatccatgttatagaaaagaactttgcagtcagacattcgtcatgggaaagttcagaaaaaaataaagtccttttaagggaacttcctgaattttgtgtattaatgttctttaaaagtttaagtattctacaaaaaaaaaaaaagttttctccattgattttcacctgtggttcataccagagacctgagaatgtttgtaaatgtacaagtatcaaagttcttacagttaattactgcaacttgctgctggacaattgtatacagagttaaaggcaggtctgaataagacctagctttgtttttttctaatggaatgaaccattttcctcttctgaaaattctgtatctgagcacatcaagagactcttgtagcagtggttacccagacttacagaattatgtcctccagaaaccagcaagaacacttggaatgaacgaatgaacttgtagggggcatagaggattcttgaaaaaaaaaaatgcaagagtgattttctgttacattcaatttcaaactctctaattgtgggttttctcctgaagaattttttttcacatactttccaaaagaccaacaaatggatgttgacaacaacccaatgaaataacattttgcatatctgaaaagaagcattgaatataagccaaaagctttcactgaaggtttttttttcttaaaaataaaaaaaaatatataagtgtaacatgttttcattccaaactggtagtggtatgtagaattaaagataataatgttgcttcttattcaaactgttggtcatatgtacagtatataaacataaaacacacaaggaaggtattatgtatgcagtagtatactagagtttaggaaaatgaaaattttagaaaatatgttttgtcaccctgttggtcagaaagatgtctttctggttttaacgcatgcaggcatgtaaatatttgtctggagtcacagtattaatgaatgagatcttaagcatctggtgacatcagaactctgtgtcagccacttttatttgtatattgaaccctagctagtgccccaagctgcactattgggaatggattgtggctgaacagcaaatcaaaacaccagaaatatttttatatgttaacgtcatattatgttaatgttgctgaaaacaaaacctaacaaaccttgatgtaccagtccaataccatgtagcgctgagtgataaagttaaaatgtgctgtgcttcccacccttgtcagagggaagggtggctatgtgttattttcactgtctttttgaaagttacagtatgtgttttcactttcgtgcagataactggaagtaaagcggcaaacagtgcttattacatgctaaagttaccttctctttgttttttgcatatctggaattacacctttaaagactgatatgaatcagtacggtcactatacattttatgatttttctgtcatcttaaaattgtatgatcgtaacattatttattaccacaaaacagcaaaatcttcaatgtctaagaaaactagcttaaaatgtttaaatatagttctgattgggtattaattacttgattaagaaaaaattaacattatagatactctggcattacgcttctataccttttaggtcttccttgcaatactggaacataattcttttgtgtagctcactattagccagctaagttcatctttttaataccataaaaaggttatatgtacagttcctattttagcttgcttacaaagggagcattatttttatttaaagtattgctagtaaatgatttgtagaaacttggttttctaagcatagttcttccataaccaccttttgttgtttgagcacaagggattcttttcctagttctatgtgtttgtttccctatatgcagtctttaaaggattacaacacttaaaattgaatggacttgtgtcaagctttttgcatcatacattttttgaaagatttttaaaaaagcctacaacttacatatgtagtagaatcagccattgctctgctcctggcatagagtcacctgtttgttatgtggattaaatagttttaaaatacatatttgaagacctttgagaatgctttagtgtttgatttgaaataaaaggaaattttagcaaggattaaagaaaaaagctatcagctgtatgttaagagagactcttactaacatgttgtaaatattacaattcatgaaatgttattgtaagtctgtaacttaattttttccctgttttagttatacaggttggtttggaaatttgtgttttggcataaacaagtaaaatgtgcccattttatggtttccatgcttttgtaatcctaaaaatattaatgtctagttgttctatattataaccacatttgcgctctatgcaagcccttggaacagaacatactcatcttcatgtaggacctatgaaaattgtctatttttatctatatatttaaagttttctaaaaatgataaaaggttattacgaattttgttgtacaaaatctgtacaaaaatctgtttttacatcataatgcaagaattggaaatttttctatggtagcctagttatttgagcctggtttcaatgtgagaaccacgtttactgttattgtatttaattttcttttccttttcaacaatctcctaataaaactgtctgaaatctc

SEQ ID NO: 290 - DNA, 19156 bp, Homo sapiens
ctgcggcgcagcagcgactagtgggagtccgatgtgggagaggggctgcggccaccgccaccgccgccgccaccaggaaggcggaggacgcaggagccaagagcaagggacgccgccacggtcatcttcgcctgccccgccgccctcttagagacactcattgcctatggatcatcctctcccagcttttgcaagcaccgggctgctcgcccgctgattttcctcctccataggctcactgcggaggcaacggcgaggtgtccgatttgtgcacttgaggcccgcaatccgggacggtggggaatctgcgcctcctggccgggtagtgttggaagcagggcgaggggaatggggaaacgcttcgtatttcaccgaaccgcagatcttagccagactgagctggggaggaaggttactgcaggcactcagccagggtgccttgatttccagctttgctatctagctttcgggaaaaacaggtgtgggtttactgggtgcgctgattaggagaaaaagctctccgtgttatgcattgattttgttaatttcctttctcggtccacctggcaactgtgctcctcttcgcaggcatgaagaccccgtttggaaaggcagctgcagggcagcggtccaggacgggcgctggccacggcagtgtgtctgttaccatgataaagaggaaggctgcacacaagaagcataggagccgacccacctcccagcctcgggggaacatcgtgggctgcagaattcagcacggatggaaagatggagatgaacctctaacacagtggaaaggaaccgttctggatcaggtacctgtaaatccctctctgtatcttatcaaatatgatggatttgactgtgtttatggattggaacttcacagagatgaaagagtgtcatcacttgaagtccttcctaatagagttgcatcatctagaatcagtgatacacacttggcagaaataatggttggcaaagcagtggaacatatttttgagacagaggaaggttccaaaaatgaatggagggggatggtcttagctcaggcacctgtcatgaacacatggttttacattacctatgagaaagatcctgtattatatatgtaccagctcttagatgattataaagatggtgacctccgcatccttcaagattccaatgattctcctctggcagagagggagccaggagaagtcatagacagcctggtaggcaaacaggtggaatacgccaaagacgatggctccaagagaactggcatggtcattcatcaggtagaagcaaaaccctctgtgtacttcatcaaatttgatgatgatttccatatctatgtctacgatttggtaaaaacatcttagaggtcatcttgaaatttgccaaatatatgagactctaaatctgtagacacagaaagtcttgattgctttccagtttgtaagaaccatcttctccctttttgcacgttttgcttggcaaaaaaattggaacttctgccctctcatacgtttttggaagaaaccttttgcccatctgtccaaccttttcactggttcctctccgcaatttaactgattagtgagaagggtaaagtctgacatccattggctcatacttttttttatcttgggtggtgttaatagattaaaggtagctgaacacctctcacctcactctttttggcacttggactctacactcattgaggtgtgaagcttgctgagatatcccatgtgactggctgggtaagtgtctttgcaatctcaaatctcccccaagtggcttcaaaaatctaacttgggaaagagtgggaagcccattttggtctcttgttcaagttgcattctcagttctaactgtactaaaagtaaggctaataattttgctctctttccggttctttcacctattgctcaactgttttagaattaagaaggtaattactttgcattttagtacctaaccataggctgagaaaccttgcaaaactgataagaagacaagcatttggggaccaaactccaagtggagagatcaagatttctggtggagcttaagtgaaaggttttagtcatcagtggcattagggtctctcttgtctccaatagctctggctggtatctgcagacatggagtaggttttaactgatagaagctgtgcaggcagactttagcacaaatggtctttgccagcccagaggagcattaagccaggctctagctagagccctcagtcacaggcaaaggctgggtttggctgggtttggacagatctgtccagaacctcaaaatgaaagaggagaaacctagaatcaaactgagatacagatttctttgctgtgctaagagagactcaagttttagatttgattcttaggagactgaattcagagtcccagcatgtgaggtgggcaaggcacttgtgagaaccaagaatggctgaaagcaggctatacttccttgcagggactggtgggctcatctattatggtatcccagcaggacttggaacacagtcagtggtaggtaatctgtaggcttaatgatgttttaagtgctggcattggtagatagaaatctaatagatttttgttagtgtttggatttttaactatcctgtttcttggctggccctaagaaacttatatgcagataagggtgagttctactgtggcagaaaagtaaacaatggaagggcctttgagctttccattattaaagagccattggcggaggttaaccaaagcctaggaaagaaaagttgaagtacaagcatggtttttgagagaagcacctggccaaaaccaaagctttctcattgaggttctcacagaagctccattagcagtaacagcctaataaggccatggagttctgcacatttggggctgggactcaaggcagtacaatcatattgggactgtactgcaagatatcttccaaattagtttaagttcacaggtcatggagtccagactaccggcacagattggcatcctgctgaggatgaaacaaagaagatgttctcttttctcctatgttttatctgtctacttttgctttttgatgccactaagtctctactatgatgtttgactgacaacagcaatgtgggtctgtattgccctatgttctaagtcctggggtcatatatttgcttaaaaaaactgttctagtggctggggactagtgtgctttctaatttttttgatgtgaggttgatattgtgataatcttatgtcttcttgaccctttggactctttaatatgtatgacatgcaattgtggggttagattaattcaactcctgaggtcctgaaggaacttcacccagtcaagaggaagacagccaaggctgcagctgctgaaggaaccccatatctgggcagacatctttgtgagatctatatggctgaaatgagaaaaacgagaaattgggaaaggcagaattttggactttaattattttggactttgaattagaaatttaattttgggcagtcctttttcccttggagtttaatagttgatggggtgggggtgaggtcatatagttcaaactaaggcatttttattatgttgttgatattgtattatttggagtattttaatgctatctttgggagtcattgtataattgttgtcagctatgtcaggaaatatggctggacataattgtaaattagggctgcaattgtgatcaaattttcagtctagggtgtaatgtagccttagagttaatttaattactgttctattttgacttatttcagagcctcttgggggcaaaaacaactgctcaccaatcttacattgatgggagcagaacttttctaagatactgttggtctccctggaaggggacagccacagccctgtttgttgaccagagtcttgagcattaaccattgtggcttaagagaatgaaaatgtacaagggtatgatgggatctatcctcttcctctctccatgctcctgactcaagaaaaggaaaagacttgcatctctcaaaaatgtttggaagaaagttctacccatcttctcttacactcattcaatcttatgcttgggaggaggaataacttgatgagattgagaaaatggttataatggataggcagcttaggccactcttggatcttgagttcgttccacacagcaagatgtgggaaagactgcagtccttcactacatggctgggtaaacatctgctttctagacccaactatctctccttggggtgggggaatcccaaagtcgttagacttatgatagaagttcatttcagcctcaggtccaagccatgttctccaatccagctctatcagctataaagctggtatctattttgattcttttttacagttttaatatataaattgttttttagaaaaataacacatgcctatggtaaaagtcaaacagtataaaagggtatactattaaaaagtaagtctctcttcctccttctcacccctggcctcagttccctggtcccattttcaaaaagtaacaactgttaccagttactgatgtatcattccagagatattccatgtatttacaagcatattgtgtgtgggtatgtgtgtatcaggttttttttttttttttacacaaatggtggcatactatacatgctgttctgaattttgcttttttcactgaacaatatattaaagctgatatcttaatccctatttgattcctgtgtatattttttaattggttcagaatctggaagggaaggaggtgtaattaattcaaaccttcagaccctaacccagtttaatgaaaacttacatgaccctacaaacccacaatttctgccagtccaatttttctcaaaagtagaatgtgaaatatatgtgaacataacgtattctctgagaggaacttctcaagagaggccagtatatttttactgagggaagttaaaaggaaaaccaattatatattgaagctgtggggaaagttaaggtactatataattaataaaccagaaatgaaatgaacaattatttttttctgtttaaacttgcactcacatctactgcaatatgcaaattcatatttatagctttgatttgccttttctaacagaacttgcctgcatgtaacaggaaacccatttcaaacaggcttaaactgttaccaaacgttgatcaatataaatttaaaaaaaatctagagctcagatgggcttcaggcatagtttgaattggggctcaggctcagtgtttatgattctttaggattttccctctgtgtgtcagtttcattctcaggctgttttttcttatggtagcaaaattggaccagcagttccaggctacagcagtccaatctagagaaagatagataacctgtgtcctatgatgtattctcagctggcttaggtcagatactttgaccaatcactaaaatctcagggatgaaatacactgattggcttagcaaggtcaggtgttccatccctaacctctagggcagtggtccccaattgttttggcaccaggaactggtttcatggaaaacaatttttccacggacagggtgggtgaggggaggggggtggtttggggatgattcaaatgccttacatttattgtgcaatttatttctattattatgttctaatatataatgaaataattatataactcaccataatgtagaatcagtaggagccctgagcttgttttcctgcaactagactgtcccaaatgagggtggtgggagacagcaacagatcatcaggcattagattctcataaggaacatgcaacctagattccttgcatgcacagttcacaatagggttcatgctcctatgagcatctaatgccactgctgatctgacaggaggcagaactcaggtggtaatgcaagtgatggggagcagctataaacacagatgaagcttcgcttgcttacccacctgccactcacctcctgctgtgcagcctggttcctagcaggccatggaccagtatttgtcagtggcccaggggttggggacccctgcactagggtatatctctctgaaaccagatggatttccagtagaatcaagggctttgggtaaatgaataatgaatgctattcaccaatcacaaatatctagtatagcttcttcatttgaatacctagtatccatggacacatttcttcctacacatcctctttcaaagaatgcccacatgtaggtgtgataaattcatgtccccaaaggagaaaaacctgaagtcttatctagttactgcatttagcgttaagttcaagatccctagttgatatgcagccatctttagatccatcttccttgcagtctggtcacctatacttaaattataaactactcttctcaacatacccaatatacactagtggggagataaccagagaaatataatcaaaactaccatttgaaaaagggaggaaataggaaacaatacatagtagcttctggtccaaagcatatatcataacctgttagacaaggactacctatcctggcagttgagtgactcctttggtcaaatacctctttgtgttttctgagacgttctctcttggaggcatatcttgggtggatgccctttttgggggttgaactgggcattctacgccacttcttgcacctgggggttgaacaattggaggtttttaaattattggctataattagagattatttagtacagtagctctcactttagtacacaccagaatcaccttgagaacttgttaaaatacagatttctggggccctcttacagagattctgattgagcaagtctagggtggggtccacaggcttatatttataacaagttcccacatgagactgatgctgctgggaccccacattgaaaatcactgatttataggtggcaattgagtgaggtcagagttattatttcctatacttacctgataagatttacctggagtgattgttaaatataaattgctgagtcccatcttagatgtaatgaatcaaaatctcttgggaagggacctggggcagctgtacaagatacctcaggtgattctttatcatcagtaatgattaggaaacactgatctaggaaattaggtttttcttgctccaatcttatttcctaataagtcttccatctgcttgcccttgttctcactaagcttaatttggggcaaaaaaaacttggcttttcaaatcatacaaagttccaaattacccacgtctctttccactgggatttcacaaaaccagtgagtaaacaagcaaagttttattttcttctttcactgttttcaagtaggcccatttcaacaatggagatgttatgcttgatcttggcctaagaagcacagatctgagggccacatgcttcccaagaaagggtggaataagtgaaaaaaacaataaagtcagctgattggacattaattccaggttttactagctctatactagcaagttacttaatctttgtgaatctattccccttcttgatagagagagtaacactctttactcagttctgtttagaagtatatgagaaactatatccttagcatgtaacatagtgcagcacagatgcttaataaaggtgaattccctttagttctcaagagggtaaaccgcatgtccttttggttaacctttatatttagcagtgctccagtgacatgtaactagtgaatataggtctagaaattctattactgaaatgtgaaagaaattatttaaataattctttagatgtacatagctcttttaatctctgctaagaactgagtttgttttcccagagagctcgttaatctttataacattactggacagttaagagagcagggttattatcctgaatgcaatcattcattcattcattcagctactttttgatggatttgcccaatagtgattaatgagatagatactgtccattctgtcagggagcttacattttcatagaggggagaaaagcaacaaagatatagacaaataacctaaataacgtgtataatttcagagagtgataagttgtatgaagaacaaaaaagcagagcaatggatagagatgaacggaaataagggaactacttcagcaaaaggttttcagaggaaggcctgagtggatattagcaaataactaaagaagccagcccatgcaatgatttgaggaaggagtgttctagagagaaaaaaaaaaaaagttgaaaggctggaatacctgatgtcatttatccatagctattaattcagtaatgtgtttaacattgaaacctagggcctgtgattcttctctactgttctgcacagctaacactatacctctgctgttttctggtatgtttttggagtttttaaatatgtttttgtttgtttgtttgtttgtttgttttttgagacagagttttgctcttgttgcccaggctggaatgcaatggcccaatctcggctcaccgcaacctccacctcctgggttcaagcaattctcctgcctcagcctcccaagtagctgggattaaaggcatgcaacaccatgcctggttaattttgtatttttagtaaagacatggtttcaccatgttggtcaggctggtcttgaactcctgacctcaggtgatccgcctgcctcagcctcccaaagtgctgggattacaggcatgtcccaccatgcccggccttaaatatgtttttctattgttatcctagaaagcaagtaaagtggctaagaggtcactgattaaatggaaatggggcagatttcttcctctaccccaaatctatgaaacaggtgcataacataaagttgaagctcacatgtaatgtaatgaatgtgtatacctatttttctggttacattttcaagcacatactacaagacatttgtattattagtttaaatcatttgcccttggaggatgtcgggatgtcagtaaacatttgttggacacctagtatgtgttgggcacatcttaatctgcacaggatactggaagctgtgtgttactacctccatttttcagataaggagataaagcttaaagagaaaaaggaaaccaaggtcacacagctggtaagagtgctggactgaaactagctctcttgatgccaagtaatagtctaattattattttttcctaatatttgcataaagaaatgggaaagaaacagtagcaccaagggggaagtccaggtgattcacagctgtgattttcgccatgactcattcatattcttccctctctatcaccctcttttacacacactttgttcctactgttaaatctacttaattcattcatttgttcaacaaatttattcagtgcctactttgttccaggcactttaactaggcatttgggatatatcatgaacaaagcattcagtgatgcctgttctcatggagcttacattcaagcaaggggaggctaacaattaaaaaaataataataataagtaaattatgtgggatgtcaaaattgataactgttataaaaaagaaaattagaacaagataagagggaagggaagtggtaggtcaccatggtaaatagggagattggggtggacttcatggagaaggtaatatttgagcaaataaatgaaggaagtgagttagccaagcatatatctagagaaagagcatactaggcaaaaggaactactagaggaaagggcctaagagataagtgtgtttttggcatgttcaaagactaacagggaggcttatttagctagagctacataggtgaaggagaaagacataagagaagtcagagaggaaataagggtctaaataatataaggcattgtaaagacttggtatttactctgcatgaaatggggagcctgtcacaagttgggttttcccaggaaacagacccagaaacaaagttaatcttgtagaaaatttattaagcagcgcccttggggtcaatacctggggaagaaatgggaaagcagcaggagcacaaagaaaatgaagctctaaaaagactcagttacagtgtcaaccacacccacaggaagctgtggaactagaatggcccttcagagttggggtaatatttacaggcctttcaacccctacactaatccgtctttggatatgggctgccccaggaaggggtgttgcattggacaaagttgctttcagcagctgaggcaatctctaatgggggtgagagctgaagcagcataataagtccatcactgaagcataacctgggtgttgcatcccatgtccacaaacccactgtggattttcagcagagaattgacctcacttatgtttctaaaaaaatctctctgctgttttaaggacgggctataaaggagagagtgaggaagcagggaaactagttagagtattgcagtatcccatgtgtgagattatatctgagaggtaacaatggagatggtgagaggtatttaaatttggggtatattttgaaggaagagtaagtagaactttctcacaaattagaagtgaaatgtaaggaaagagaggagtcatggatggctccaaaaaacaactgggaagatggagttgccactgatagagatgaagaaggctatggtttggatgggtgctaggaagaggagaggctaggaaatcagttttggacaagttgagtttgaaggtgtttttaggacacctaagtggggctgttgaacagttattggatatatgagtgtgcagttcatgggagaggtctgactaagctggatacataagttggaaatttctccatgtaaataatacttaaaaccatgggactgtatgagatcaccctagggaatgggtgtacatagagaacaacagatgaccatggacagagacctgggtcttaaagagatcagagagaagaggagacacaaacaagagactgagaagtcaccaccagtgaggtaggaggtaaacgaagtgtgatgtcttggaagtcctttttggccttcctccttcccataaatctctttgtgacaattttttttttcacttaatctcaaatgtcagctcctccactgtactttttttttttgcttttcagctcctttgaataaacctgcccaccaccaagaacccatacatgactttcttttcattgtatcaaagtaatgtgtccaccggtgtgagcaccagcaactcacttcttcctcagacatctctaaagctggaaagattttgagggacaatatggtttccttcaccccacaccaatgttatgaatgagaccagcagaccaacagcaaacacctagaaggtaagaagttattttttaaatatcctcttccaaccctataacacggcagaaagcaaatggaatggatggaacaagtgtcaaaaaacagtgtcttcgtgaacgagagagaggggaggtgggctctgaaagcctaactcaaagctcagttgactaattaaagaaggaaattagagggccgtgctggtatgtgcctgtagttccagctgctgggatggctgaagtgagaggatccctgagtgcaggagttcaagtcccatctgggcaacatagtgagacctccatctctaaaaactaaaataaaagaaggaagtcaaggccaatgcaaggagagacctagttaacctacggctctattatatcagtcctctgtattatacatacatagccaagcactacccagatgctatcattcagtgatctgcctcttcttaccagcatttagttatggaacacaaaatatttctagtgcagatggcctcagcggggtccccagtagtcaagccccaccctagcatagtactgaccttgcagagcctttgctcatcccactactcaggtctgttgaaactgttgattcccatggatatctgttgatttattatttgctgaatatttgttgataactgtagatattcgttggccttagggcctcccttgcttaaacactgaagtacacaaatcactgcacacacactatcagattcacccacacagtaattcaaatggtgcttggcccacttctttccaaaacctcagacatttggaatgctatcagttaccctgtgtgagattgtgactgtttcttaagagattccattctgcatgggaagagagaaaagaactgaagagtagtgggatggctggggatagggtagaaaatcccaaagttttctaatcctcacctcttattccttgtctctcactctcctttttcccctcattcactaaaatgtgagtaccctgcacacatgagtaccactagctgcggggcacgtaaaagaacaggtgtctcaagaatgactgttgaaaactatcaccctgcacaaggaaaggcaggttttggaataaatattaacatatcagtattgtctgaaattgatgatgccttttaaagtggatagtttcacagaatggaaatgcagtttgtaattttgcatgacaaatggggccactaaactgcatgacagcattacataatttgcctggaatgaagaccaccttttcagcccagcattcaaggcccttcatgatctggctcctttctacctttgtagcttaactatttactactgcactatttactactactccctggtccttatgtttcaggccatttccttcaacagtccaagttgtttcaagtctcttggtttttgcacttgtttctcctgcctggaatgtgcttcctctcactgtattacctgggtggaaacaggatttacttaaacatttcatatctgaagtctttaattaactccacagcttggtcagttgatcgctctttactcttatatcctttatccctttgttatagtatttactgctacctcctgttcccccagaatgacagcttctctgtgatctcttcagaggcaacagctgtgtggttgaattcctcttcatattctagacattgcccagcacagacaaggttctttctggggcatcagaaagtattttttgactaagtgactggctgagagaagcaatgctggccctgggtattttcttctcaagacaagtagaagggatttgccacgagagtacacagaagcactggaggagaaaagaactgaggtgacagtaacaatcttacggccattctttcagatgataacttccagtgcttctgtgaagtcagatgtttccctcccttttctcacaagaagaaactgagaagggaagtggcaggtctcccaggtcccacagctaatcagcagtggggctggaactccaaccttgggctcctaacaccagaccctaaacttcctgctccagctcccctgaatctgggcaggagttatagctcaagcctgacctggatgcattcaggataaggggtttctccatatgttgcttctggccctgagaattccatcatgatcctgggtggtccgtgatgctgtccagggtgagcccatttaccctgagaggatgtagtacctctccaagtaacgatggagtcaagtgtctatctctggccagcctcaggacaacaaagatgttttttcacccatcactgagctgtacattgtgaacaaactcggggaagcagcagatactggagaaccttcttgctccacttctaccatctattgcctgtgagacatgaggaagtcagtcaacttctcttccttttggacccattaattcctgaaacaaaatgaaaggcacagggaattgagggtggggtatggcaccaataagccatgcacctcacaggctttttgtgatgctctagtcatataatgagcaaagatacgcttgtgaagtgtaatgggatatttaagtttaaaaaaatgttaccataaatccgtgagtgaatattactcttgcaggaaaatgcagataggaaataagtataaaatccagaaaccagtttaatgtctgcagtgctcatctatgccatgataggaattataagagagtttaaagctgtagtttttgggatttgaagttgaggaactttttatccattggtagtttaaagtttacatcaacaatgtcataaacctggacctttagctggccacctttgaaagtatatagagaagatatgcatgagaataaaggtacccacagggggaaaaccaaatcacaaaatgaaacaaacaaacaaaaactttatcatgattataacatttgaatctgcggaatttttctttttctttttttttttttttttgagatggagtctcactctgtctcccagactggagttcagtggtgtgatcttggctcactgcaacctccatctcctgggttcaagcaattctgtctcagcctcccaagtatctgtgactacaggcgccagccaccaacatgcctggataatttttgtatttttagtagagacggggtttcaccgtgttggccaggctggtctcaaactcctgacctcaggtgatctgcctgcctcggcctcccaaagtgctgggattataggcgtgagccattgtgccagtcctgaatctgtggatttagagaggctttaggcctcttcttccctctgtttgtcccagtattattagtcaatacattgctttcattttctggcacttaccaaaaaaaaaaaaaagattttaactaatatgtttctttttattttttttctttttaatgccggtaatgttctgtaccacgaaaggaaatgccaatttgttacttagatgtacagaagattgttaactgggtatatggaaattaagaatgtaagcatatacagacaaggactggtggtaaggacagaaaaatagaatttaagagctgtgcgggccttgagattgtctagtctccctcctcatttgtacagagtatgaaacaggtccagagagtggaaagggtttaaagtaacagtaaagtcctataggagtcacatcttaaatcagtatgtctgactcccaagccacgctgctactgctgctgccccttcttcttttgtcccttttttttttaatgaaggaaattaaaaaagagagatacatttttagttcttattttattccaaccccatttttttcctttgtcgctgaactgtagttgatatgtccttcctactagtttattttttcactatatatgtatccccaaaatatatattgttttcatgttttaaatttttacccatatagtgtactatgccagtatttttgtgtcctgcttttttcactctatttttgtgaccttttcatatggatatataaaatgccattttgaggctataccacaatgtatatattcccaaagaatgaatatctaggtaattgttagtttgggattttttgtttgtttgtttgtttgtttttaattcttgttctaaaatatccttacacatttctccttttgcacatgagtttctgttgtgcatatgcctagaattgctgggtcatagggtgggcacatcttcgattttgctagagaataccaaacttctcttccgaatagttacattggtctgtcaggtggaaccagaatctgatctgagtacgtcacaagatttagtgaggatccaagcagaactagagtgtgaaaacacgtgtgaagttgttgacagtgctgtgtcatgaatcgtgaaggggcaattttaagtcagcatatggacaacaatggtcataggtagacactggataaatgaccaacttgtcctatgaacgaggtcttaattttatctaccttaggaccaagtccagagaatcagcaaaaatgattacatttaattatatcttcatgttttgtgagggctttagatctgatataaacatacaggaaaaaatcctttttaataaagctggaagagacataatagcatcagtttctaggcagaaaatcagccctatacaaattctaaaggccggttacaaactggacatgttttaacatggtttagaatgttttcaccgaaaaactagcactgtgcctttgtctctgagaaaaatagataaatgtgtcaattatgtgtttacagtttaattcatattcagttatattttgcagcttaaaaggccactaacaaaaaaatagaacataacaaaataaatctcacttggaatactggttgttttgtttgctgtttggttcttttagtgtactttcctttttactgtgtttttgtttctgggttaagatggtggcaaactggtgatgcttcatccacttttactctctcactgaataatccatgatggactggagaatctcaatgattggttcaccatactctggcagaaattcctactgactgccatataggtagggcttgactaagaaactcttggtaaccaatgcagactcagacctcttgaaaaaaaaacagcagggccaagctggataaaagccaaaattactatgtttgccagattacactatcaggttttgtagaacagctaggactctcatatacctaaagatagtgaaaagatgtatagagattgctgaggttggaaatatatgttgagtttaatctaacactgtaatctacaatggcctttcaatgaaggtttaaggaatttggaatctgttctgcaggcagaagggaaagtactgatgattttgagcagtgacagtaggatcagatgcatgctttaaaaggtccagaagtataaagggtatatgtatattagggctggagtggctggaggctgggagacaaacttattgcaagactccacataagatcatatttacctcactgagtcctgtcctcaggtaaatactgttaattaaaagggtttcaccatttacagagctttcagattatttatccttaatattattatccccacatgtgctcatgagcaagcctctcaggatcttctgctccagtcttgtgacggtagcatgttcctgcttctggtggtgctaaaccctgggcaatcatctctcctaggaacagctgttcttcatgggtgactgctgtgaaaccaacaggatggcctcttttctatttaatcctaagagtgggcataaggtaagcgtttacaagattttactgaaagttttggaatgtaagaaggaaaatgctacactgaatataattacaactattcaggcacagacgcatcccagagtctcctaccaagttgactctcctgtctgtcttccttttctgccttcacttggcttcagacagctcaccttccaaccactggaagtgtttatagcatctccacatctgtccacaaggtggagttcaaggccaaatttttcaccagctccagatactgaaaggagtactttttcttcattcatagtcaaggtaaggcctgcctcctaggtcttcatttcctgttcatacattgaatctgacagtggcaacatattccctttggaggaaattctgtctaggcctaaagcagtgtggtctagctttatggtttgattaaagacaatcacacaatgtcccatatatttcctacatcacatgtaggccatcaacagtctgatcaaggtttggctatgtcaagtccaacacagctcctaggtatcaaatgatcataaactctggaggttcactctcactcatggcacctgtcttagcctattttctgttgcttataacaaaatacctgaaaatttatttaaaaaaataaaatgtatttcttacagttctggaggctgggaagttcaagattgaggggccacatctggtgagggccttcttgatggtagaaactctctgcagtcctgaggtagcacagggcatcacatggcaaggggactaagtatgctaacatggtagcttaggtctctctttctcttcttataaaaccaccagttctacttccatgataatctgtcagtggattaatccattcacaagggcagaaccctcatgttccaatcacctgttaaaggccatacctctgaatactgccacattggagattaagtttcaacataagttttggagggaatattcaaaccatagaagttcctttctgtgtatttttatgcatgcatgtacacatgtgtgtagagacacagagaggaccagagaggcagaaaacgcatatatacacctgtacattaaatccatctatgtgcacatatacgaagttgtagaaatagaaccatagtatatatcctcctctataaatttttccacttaatagaacgtgaacatgtttgtaggttcttatatgcagagttacttctttgtatagtattccattgtgtgaataaagcataatttatttagcaaatccttgttgatatatattgggacagtttccaaaatgtggttattatgaacaatgccaccaagaacattgtcatacacatttattgtgtacttatgcatgaatttcaatagtgacacgttaattcaaatatttatttcttatctttccaggtaaaatattgggtaggtcctttggagttctagactcagtttgagattacagaagatatgctcaacatcctcctttgacctggtcccagtttcaccatatttgctagatgctttatagtctctggtaaggaggtgtacaattctctgattttatttcagtttttagggaattttattttgttcatttcaacaagaaaaattacataaacaggtaacagctccactcaaagctgttttaaatgaacaaaatattggactttgtgaacaaatatgatactttttctttctgcaattattggctagcaatcttattttactaaatctatactgacaaatttaatttggtccatttatttgagtttaaagactatttcaaactctccccagtgaaacagtcatgggccattgctatcctcaaaagaactaaatatataaatagcagctttcctcaaaaaagatgataaagtcttcttttccctttagagcataaatttcagtggcaggtaaaactattttagcaacaatatgctcacttcttccatgatatgtttttcttccctactaagttgaaagtttttctcagtttccatagccactcacaagtttttctctacctaactgaagttgccctcttctgctggtcattaggacattaacttttagaatgatttctgtttcagcctcttgttttgaaggcaggcttttaatttcctcagagaaattgcaatggaacgaaaatttgttctctcttttacatatgtacacttgtataagagatgtaatgtttttaaataaaatttttaattcatgcaaaa

SEQ ID NO: 291 - DNA, 24093 bp, Homo sapiens
tcccctctcgaggacctgggttggccagcccagctttgtacgggtgactgaagtccacatcgacgtaacagttgaaagggaaggacgcggagaccacccggtacccgccccaggcgtttccagagtctccgcttaggcggcccgtgggggtcggggtcgcggtcgcggtcgcggaccggggacagagcaatggggcgggcgcgcagcgccggctgcactcccagagcctcccaccgccgccccacggccgcctagcgcgcgccgggactgcatttcccataggcccacgctgcggagcaccgcccacccgagtctcacgcgagtgcgctgccgcgaggtgtccctgccgcagcccccgcccgcccgcagagcttttgaaaggcggcgggaggcggcgagcgccatggccagtccgggctgcctgctgtgcgtgctgggcctgctactctgcggggcggcgagcctcgagctgtctagaccccacggcgacaccgccaagaagcccatcatcggtaaggaggctgtgcggggccgcagcagacggggaggagctgggtgttggcgctgggcgcctcccgccgccgcgctccagctggcgcgtcccgccgggaaaaacccccagatgtgcttcgcttttggtgcaaggaggaacccgggctgggcaccatttaggtcgtactgaaatgtacctggttgaggtacctcgttcattcctttagactcatatgactcttaaaggtgggagggaggagggtgcaccatgaagaatcctgcggattttctttttttgtacacagctaggaatttctactaaaataaaacatttccttttcgcacatagttgggaagttttactcatttacatctacaaattctgtacatgcattgcattcatcaaaatgtattgatggcgtatttaaaataccagtgcattgtaatagaaaatcaagaaattaaggtataacttggattttgtcatgttcagtagcagaggacaacagtggctgatatcctaatgtgagttctatttggtgttaaaatgcagcccacaatttttcgtttccaacatatttgtgttttaaagaggtagtaaaatcagtctgtgttaccaaaacacacatttgagacaggcccaaggaaagctacctaggagaaatcatcctggggttaaaatttgcccaaagaaatttgtgtgtggacattaagattagttttattttggctgtaggattatgcctttcatactatttttttctatgaatattatcactgtattctgtaactaaacagaaagtagatgaatgttttttcatataggtagtgcccagttttcaaatgggttgcttactaatatttggaacttatttcatagctgtttaacatggtgatttgattctccacgaattaactcaagctgtaattaatgtaacaggttgcatattgtgtgtccagagaagagaaaaaaaagcagaggggattcttcccctttcctagaatcaggggtagccctgcgtcaaatatttaaaaaagggactttgcttttggtcactgagatcagcacaacatcgttaactgagtaccgactatgtacacaatcttgctctgggaagtgcaaaggattgaaagatgacaagccacaaaagttgtgagatggccttaaattattggtggaattttggtcatattttgagggacagggagaacagcttgagctcttttcccagggatgggaaaagtgaatatgcgtgggcccaggggaaggggagatgttggtggaactcactctgatgtacttctctttctggtacccttgtgctcccatgatgccccatgtctcctttgtggtacctcaccccatgtaccctgtaccactccatttcctatgacactcctagttcttcgttccctagccaaactttgttattccttagtgaagatgatcttacctaccagtaaggagaaaaagttttactgaacaaattttggcgtttgacatgttaatctgaatacctgatgaatgccaattgtaagaagctgggaatacaaaagtgagtaatacagacaacagctcttcctatcaggtggcctacagagacactgaaagtgttccaaatgctgaagtgctgaataggagtaggcacaggtactcacccgacagacgtgttttgatgtatactggttgctatactctgctggggctgggtttcactggtaaaaggaggccagagagatgggtggggcagagcatacgggtcttacagagtttattaaagtttagggacccactgaggtagttaaacaaagtggtgacacctgcttgctgatctatcgctacctgatgtcctttcctattgctttctgctttcactcacctggctctaataatatggattccttgcaacgtgacaggcacaaatctgactcctggcctttgcacttgctattcctttgtcctggattgctcttttcccagatatatgaatgtggtttactctgtcacctctctgaagtcctggctcaaatgtcatgttttaccttctcagggaggacttgcctggccaccgtgttgaagagactgtcctttcctacatagatgggctctccttccccaccgtctttctctccttagtgcttacgaccagccatcactctatatattatgcctttttgtcttgtttattgtttgtcctctttcccctccctgctacaccctcgaattaatgcacacagggcaggggcttttgtttggttcactcatagtcatgtgtccccagcagctagtttgttgcctggcatgaggtatgattcaacagtatatattgaatgactgtaggaataggaatggtgatatgatccgatttgcttctacatggggagctgcttggagcttgggggggtttcttaagaaaagatataacaagaccttctaagagtctattatgatagtgtggtggggagagggtagatattgatagcttgggctaaggtaatgttggagaggtgtggatggaagatgttttcactcctttgcttcgttgtcagggaatcagtgtgtctgtgagtatgtgtgggaaaggagtgacagccttgtaaatttaaggatctatattctttagatggattctaggtctacagttgtgtgaaggctgcaagtgctattgtaagccttctttgggggcttatttggcctccctaatgaggtgagagatagatctacttgaaagtaagatcagcctcccctgctgctttcccataggctatgggtggacttggaggagagacttcctatttaattctgtggattgaaataataaaatatgatatttttgctgtgatatatttcagtttctgagcaagaagaaaaggaatttgcttgaaactaaacttttttttgttattaggaatattaatgcaaaaatgccgtaataaagtcatgaaaaactatggaagatactatattgctgcgtcctatgtaaagtacttggagtctgcaggtgcgagagttgtaccagtaaggtatgattcagtgttttttttttttttttactctgtataaaaaattgctgcgtacgggtgcggtgcctcatgcctgtaattctagcactttgggaggccaaggcgggtggactactgaggtcaggagttcgagaccagccaggccaacctggtgaagccctgtctctactaaaaatacaaaaattagctgggtgcagtagtgcactcctgtaatcccagctactggggaggctgaggcaggagaatcgcttgaaccagggaggtggaggttgcagtgagttgagatcgcaccactgcactccagtttgggcaacagatcgagactccatctcaaaataataattactgcctaatatctctaaaattcgtgctttctctcttatgattacattgtttaaatgcagtaacattgcacctgatttttgacacaaacatgttgcttagagtctctcattgaattgtttaatgtgggaagctgtgtgttacctgtaacgtcattagaggtaccatatgtcatatgcattaacatcaagaatgaaatgatagtttcctttatcccagaaaaggtggttctcacagacactatgaaggtaatggagtaaaataatctaaagtggttgggggggcggggtgagggataaaaaattacatattgggtacagtgtacattgctcgggtggctggttcattgaaatctcagacttcatcactatacagttcatgcatgtaaccaaaaaccatttttaccccaaaggctattgaaataagaaaaaaattttaatgaatctacaatttaaccagctttgttctataatattaggataagagaacagttagggaatgaaggaggtttttagaagatgacttttaaaataccttcacactctactttaaaagtttgtaaattaccagtgcattagggttgcttcagtgtggattataggtattgcagttttaaaggcactgcattatttttgtgataaaatgttcctataagaataaaatgattcatctcattttcatttagaactgaattcttcccatatttttcatctggaaggagctaacaaccagaatcttataaggatttgtaatgtcttgtcagctaaaattaatgtattttagaatctttgagcacctcatctaatccattttgagtgatttcacacataaaacactatttattctgtacagcctgtttttgcaaacaattcctcatcaaaaattataacaaaaatactgttcaaatataatactactaataaaatgcaaatattacaatttagagaattgtaccacaaaatggctttaggtttagatttataagaattgtcttcttgtatgatcttttacatttaaattaactgtttctacaccaagattgccatttgcttttgatattagtctttaatattttagtagcctatctaatttttcaaacgaaattttatttgaagcccatataacgccagagttttagagctgaggaagaggctccagagagtcttcagaacagtgtttcaaagttttcatcagggaaactttttaatgcaagctgttcttctgggatgttagtgctgaccgtgtggatgggagatatatataaaaatatatatatatttttatatatattatatatatatataaggagagacatatatatatatatataaggagagacaaaaggcagagcagccataaaaaagaatgaaatcatatcctttgctgcaatgtgaatgcagctggaggcccaagtgaattaatgcagaaacagaaaaccaaataccacatattctcacttataagtgggagctaaacattgggtacacatggacccaaagatggcagcaatagatgctggcggctactagaggaggagggcaataagggctgaaaaactacctattggatactgtgctcactacctgggtgacaggatcatttgtaccccaaacctcagcatcacacaatatacccatgtagcaaatctgcacatgtaccctctgaatctaaaataaaagttaaaattataaaaaataaatgaagtaaaatcataactgaaagaggagacattacaactaatgctacagaaataaaaaggttcataaaagactacttaaactatatgccaacaacatgtgtaacctagaagaaatgaataaattgttagaaacacacagtctaccaagactgaatcataaagaaataggtaacaaacctgtcactggtggagagattgaaatggtaatcaagagcctctcaacacagaaaagcccaagaccagctggcttcactggtgaattctaccaaacatctaaagcagaattgataccagtccttctcaaactcatccaaaaaattgaagacagtacaattccaagaatgaaccccagtgtaaactaggtcttgggcaattatgatgtgtcagtgtatttttatcaactgttacagtgtaccacccaagatgttaatggaggaagctatacatgttttggggcaggggttataaaggaaatacttaaccttctcttaattttgctgtgaacctgaaattactctaaaaaataaagtctttaaaaaaataaaacaaaatgcctaaaggcaggtagaccagtttagaggtagttgcagtagtctaggtgtgaagtgttgagggcttggcttacactggtggtgtgggaatgataggtaagtgttgtttaaaaaaatcaccagtacatgatgactaataaaagggcacagggaggaagaaatatataaggatgatggaagttttgaaatcatgggagttttgaaagtggatgactttgcagaatattggtatttatgagagatgctgagaacacgactgtcagcatacaggtttatttccaaattgggttctcagagttcacttaaggtatattggaatcatgtgatcttgtagaaacagtgtaatacatatggggtgagttcatagactagcctgtgaaggattacctgatgcaaaataagactggatcatgatgatgttaggttcatttctgaattttggatgctgggagtcaacttctgtggtttagaagtgaaaaggaagagatgggagacctgggaagcattctgaaatagatgcagaaatttgtctttggtttccttctgccttctttctgccccttctgtctcaggcgcttggtgctctcaggttgtcataaatgcccaatgtgggactagtggaaaagagaatgtcctgcttcctcagaggtagcatacaggagcccatggactgctgcttttggtttaaaaacgtgttttgttcacacagcgttttaaaacatgaatcaggctgggcgcggtggctcacgtctattatcccagcactttgggaggctgaggtgggaagatcgcttaagttcatgagtttgagaccagcttgggcaacatggaaaaacccctatctataaaaaatttttaaaaaatgagctgggagtggtggcgtgcacctatgggcccagctactcaggaggctgaggtgggaggatcacttgagcccaggaggtggaggttacagtgagctgagatggcgctactgcactccagcctgggtgacagagccagacctttctcaaaaaaaccccaaagaccacaaatcaaactttataagagtctgaatttttgtttcttttgaagacagttatctagattgagttttaaatggggcaaacactccccattggcaacaatgccttaccatccttttcatgctgctaaagctgtgtgtcatttgccatcatcaccaggcttaagccatttcgttacagttaaggagagagtaaactgttcctcataccttgttgaaagggacttttgtttcaaaaaatgtctgacaacatgcaactaacagctgtattctctgccagggcccctaggcaccagagttgtgacatggcacactccttcccctgtgacaattaggtctcttaatagagataaatggggaccaaaactatagtcatggacagtgtgggagccatttatttagaattaatgaaatgactgaaactagcttgcaccgctagctggcaggaatccttggagtgcagctgtgtgatctaaatccattttggtccctgatggcgatggttgcccattttggtttaaatatccatggggagaattctgggtcctgactggctggttcctttttgttgccacaatctggggagattagactggcagaatactgggtacatgtatattgatatttcacctccctatcacttcccaaggcagggctacctgtcagtattttctccacttaagaatggtaagcaccattctggtatcacccattgctttgtggctctcgccaggaagagattactatgaacttgtgagagacctggacttgcaaagcttgtttggacttagagtagatcccagagttgtttgctggcaaaacacagcctgtgttctggatatcacaggtgtctagttaataatgggtgtgagggactttacctccccctaaaacttctttgagggcagaaatggactagttgacatctaatcataagtctacttcttttagggcaggttgagaggacaggtaccatttattctgtcacagaaacagaaggctgctaaatgtgggagagttcttgcaaggatttcactaacttggtgctctcttcccttattgttgcattttattgaactttcgggagagcagatatctgtgacttagtaaatgttgtcaccatatgtcacagattaagcccatcttttttttctggagaaagggaataaagtcaccaataacatggcgattgttaggaggcccttaaggggtgtttgatcaagggtctttcagagtaattacctgggcagttaggctgttctacagtcatctctctgtggtcctcagttcagactagatgtgaaccatcctgactttgaaatgcagagtagtccctagactgttgcaactagtttgttggggtgggatcaggcagcgacttggcatttatttatgcattttttaatctgccagagcttcctgtagttaaataggcatgataaataaagttatttaaaggagtctttacataaaactactgaatattcttacatttctttttgtagttcttggttagtagagaaattactggtggccaaatctcacggtctttactgtttttgcatactaacacatacttcacaatattaaattgcattagatcacagaaaaacatatttacttgtctgattagcaaaacaaggatagaatgatgtggctttcaagtggtttgcaaaaatgcctctagaaaagtagagaggtaatattgtctagtaattaaaaatttgtttttatttggctttttaaaagtaaatgtggagacttcatttagaggtttacttctaagtttcacaaatgtaacaataacttttattgttttcaggctggatcttacagagaaagactatgaaatacttttcaaatctattaatgggtaagttggcagcattggtttcatacggtatatgagtggtctacatatgtctgcttttgtaaaagaaatcatataaatattatacatgtttctatgtaactgtcttagagtggtatagtattagtgttctgagttcttttataggatttattttcttgggagatgcaaaagtccttcaaaagaggaagaggcaggttaggaaatgtataattgttacatagtagacacacataatttttttaaatgtgtgacttaatctttgttcttttaatgcttgtcttaaatgttttgaagctaccttgaatggcgtggcatactgcttgcatatggggtttataagtccaaagtctgaggatgttgattttttttttcaggtaaattgggaaaaaatattcaccattactcttaattttaggaaagaaggctaattacagcaatcaaaaacatttaattaccatgttggcagagatcagaaaatttgcttatactctatggggcctgtgaggaaacaagtgtgctcatactttattagagggaatgtaaatcaggtagtcttttttggggtaatattgcaatacctattgaaattagaaacacgtataccctttgacctgggaacttgaggaggaattttattttataaatatattcccaccttgcatgaagacttagactcaaatctatgcattgtattagtagtattgtctgacagtcaccccgtaatccatcaggtgagaattggttaaataaaacagactatgtacattcaatagaatactatgcaggaattaaaaaatgcggctatctgtagatgctgacttagatcaccattgtcctatgaacaatgtgatagtgttatgtgaaaaaggcaaggcacgtgatggtgtgtatagcatacaccccgtttgctttttgttaaaggtgggggtgaagagatatgcatatttctaccaaatcaacacagcagattttaatggcagttgtttctgattgggaatagggtggaagtattttactgtaaaatgtttttttaaaagagctttattatttttacttctaaaaccatgttaatttattgtttcttttaaaaagctatgtttagaaaattatttgccttcagttcagtttggttcagtaaatatttaccataaaatcagttcaatttagtaaaacatttacaatgcccagtatgtgctgtgtgcaaggtactttggcatggacaaagatcattaagtctaggctagaatataatagtagaacctcaaaaatagaccttttgaaacacttcattttcttcccaccctctccccagttgcattcctgtttggagaggaatctgaatcaagtagcagtgtagacaggaatacatactttggggagctagcctgtccagatgctcagtatgtcttcatgcaaaccagcaaaaggagtccattttctatcttcctcactcgttttctgcattgccactaattgttgctcctgtaggccccttttctctctcatgtagtcactgaaagctgcactccaaagtgggttaaattaggggccttatttatatctctgagtgtcaccagaaaatgagccgtattctaatgtgacttcaaaagcacctttattgagtcactgttatgcagtggaccccatagtattttgcaggggaatgcagagatgaaaagacagagccatgctttaaggagtttgtcatataggagggacagtcaggttttgctgcatgaaaggagtttggggttagacataccgtatttggtcataggcagctttttaaatactaagttaatgtctgtaagctggagacctgggatgcaaaacataaaaattaaaaaaaaatactgagttaatggaaagagagaatgctaatgagtcttcactaagccacttttaattgttggattttctgcttggatttgtggtagatattctcccacacagatgcttatatgttttctaccagactgtgatcttcctaacagcaaaagccactcatgtttgtctctccaggcaagtcgagtctagctcatggaagaaacagaatatatttcttgaataacaacaatcacacaagtgatatttcacatatctcaagctcgtatttaaatattttcaaaattttaatatgattaataccatttttcttacctcttttgaatatccttggttctttcaagaccttgctataaattttaaatttaaagtttaattttaaaagttgatataaaaacatggtaaaatatttttctatatttcacctttataagtgtgtaaaataatatcaaatatttttgactgccttcttttcctaggctttttctagaatcgtaattatgtttcttgaaaaaaatgttctaatactgtgcgtgtttctgaagagactcggggtgataagaattaaattcttgtagaaatttaattctagcttaaatatatttttatgaccagcttgttctttatagttaaattatttgtgagctaaaacctacccataattatggacctgcaattgatttggcatcacagatcaccttcatttaaacctggctatacctggaattttgtctgtctttgatgtctagctctgtgtactcttgcccctcccctacttatttacttttaattttcccacactctatttcattaaataaattttttgaagaagtttttggaaaatatgcactaaagtgttgttaactgctgtagtttctgaatgggattgtaaatattttatattttcttttttctttacttttctaattttcttcaaggatcttattgcatatgtaataagaaaaattgttttaaaataaaaagattgttttctgtgtgtgtatgggtcgggggtggcaaaatacaccctatttgatttatgtaacgttgtttcagaatccttttccctggaggaagtgttgacctcagacgctcagattatgctaaagtggccaaaatattttataacttgtccatacaggtaaatatcagttattgcttattattccagatgggtttctgtaagtttttgtgcgagtggttcattttttaagcagatggtaatgctcccttcaaaattacccttagcctcatcatacctttaattttgaggtgcctgttcttggctgctcccgcctattttccatgtgcttcatctaatcctgggcttccagagacccttcagagcactgctgactgcccctctcttgatgcttgttaatgtgaaccgtgtcctcatgtagtgtagacattctgatgtctctctctgtcctattttttttttatgggcattgtttctatgttattaattctcacctcttcttgaaatctgttcttcttcccaactcattcaatcctattggaactttcttcacagttaccatagactccatgtcaagcagagcttctgagcctctgacttctcctttgtaatgttcacagtgggactgcctttgtaccatagctcaaacctttgctgtttctctcctcaactattaacagtgatttttaaattaatcttgctggccctagaatcttaccaatcccccttacacatttccctaaataactgtttttagcctttgaaatacttgtttcaaacttttaatagctaaggtcagtaatctataggcttttatagtctttgggtcaagatatacagtgtgtccacagctcatgttttccagcctgtgtgggagcttggtctgaagagagattaagtgatagcctacttatggatcctggagaattcttcagaaatccatgtgtaactcaggtgcctatttggttatgacaaaagatatggctaatttttattttgaaaagtttgaataaacttagttttctctttttccacttgcaaagagttttgatgatggagactattttcctgtgtggggcacatgccttggatttgaagagctttcactgctgattagtggagagtgcttattaactgccacagatactgttgacgtggcaatgccgctgaacttcactggaggtaagagtactcttttcaaccctttgaaaaatatttgctgggcaggattagtaagtagcaaatatgaaagtaaaagtgcttatttttattttctttttagccttttccctgaaggaaaaaatgcttatgacattagcatttaaattatttacacaggttgaagatgtgaatgaccatccttgtactcatttatgaggatgacttaaggaattgtgaattttaataactcattgcttctagtgatatcaggactgtgtgtgatgaagaactctgaaatgggatctggttttgactcctagctttgtcacttttaccttgaggaaccattttacctctctgaggttcaatgtctgcatttgcaaaaaggtctaataacgcttaggggttttttttgtgaatattaaataagatttttttttttctttttaagacagagtctctctctgtcactcagtctggagcgcagtgacgcaatctcggctcactgcaacctctacctccagggttcaagggattctcctgcctcagccccctgagtagctgggactacaggcaccctaccacacctggctgaattttgtatttttagtagggacaaggtttcaccatattggccaggctggtctcaaactcctgacctcaggtgatccacccaccttggccttccaaagtgctgggattagatgatctaccgggaagcgctatatttactcagcaaccaggaactccagtgagttttggtgtctagagtttttactggaacgttattatgaaataattgattgaatctttgcctgtgtgattgaactcaatctccagcccctctttcatacttggagattgattgggctggctcgaagtttcaactttctaatcatgaagttagtttttctgatgattagtcttcatcctgaaataattgagggacccaccttgaattaccacattagcataacaaaaatacttatatcattccgggaattccaagggttttagaagcttcctgtcaggaacccaggacaaagaccagatagattcttagtgatatcactctgtataaatagataatgattattgtgggttacttgatctccgaatgcttagaattgaagccaccagctatttctgttctcatagggattttgcaaggaaggtagcagtcatacttaaaacttgtagaatgctttgtgcttttgaaagctctttcttccattgtctcacttaataattgcaaaaacctggtgggaagtacatgtattaggtcagagtactttggttgtgtgttgccagaactcagtttatacagaaaaggaatgtttcaaggtgctgtggttttcatggaagtctctagtaagaataaggggcctggtttgaaacagctggcactatcgccttgaaaacgtcagtttcttttttttcaaaatctgtttgttggtgtttgagtctgtgcagaaccttcagggttgaccactaagatatattgctttttgatctgtttactgagtcaaaatttcttggcttggttcatgttcttttctacattgtttgtatttttatttgtttgtcccagatacctctgaaaatatgttatatttgaaagttttggatactttcctgggcaaatacatacacccatggaaagttttaactgtttttcagaatagtctgtggaaatctagttaagattccctgcctgttctttagcttgccaatactcatatcggaagaattttacttattcatgttaaaattctagaagaagattacttatagctggagcatatttgagtttatgttaaacacattttgtgacttgattggaatacttctatggaaatgatgtgttttgcatatcatttggtcatcttgattatgtcttcataatggcttctctttgggtgcagtaagtgacttcagtggattttatttttttgtgtttaaattatttctcttgtacttaaattatttcaggtcaattgcacagcagaatgttccagaattttcctactgagttgttgctgtcattagcagtagaacctctgactgccaatttccataagtggagcctctccgtgaaggtatcacactaattacacaatgaaattaatatgtttagaataactgcagaagtaatcattttgttttattttcgtattctagaattttacaatgaatgaaaagttaaagaagtttttcaatgtcttaactacaaatacagatggcaagattgagtttatttcaacaatggaaggtatatcactataacatgtatactttatttcacttattttatatttttaaattttgattttatatgtctcatcaataaaatcatattactttggggcttgaagaggggtgttagggcattttgggagacaggagacatgttttgtccatgtttcaaattaattgcagttttcctgggtattttcctgaatggggtggtgaagaagaaaagtaaaagaataaagggggcaaggatgaagaaagaaatgaagaaaatgacttctgtttctagcaatattgcagattaaataccttgacagactttcctccagccaacaacaaaataaatgtgggtgatagagaaaaacatagtaaatacgttgatgaattggcaaagaaataaagatactcaggtccaaaattttaagagttgagtggaatatttaaaccagtgttattatggaatcaggagaacttgagacaaagtcaggactctctatacgaatagtatctcatggagcgggacctggatggctataccagcaatgtaagggtgaactcaaaatacacctaaaatcccccctacagaatggcaaggagaattgcccatcctgagctttggggctaagggagtggggtgggggacagtgaataaagccttgagtgtttataatgatgggctgttctcctagtgtggccagcattatactaactgggaagttggacaaatcttaagtaagtaattttgttcaaggttgccttagactggtaatgctctcatgtgtgaggctgaagcaaatgtaaatagtttttttgagaggaccagacattcatcccaggcttcaaggaatttcaacatatgaagtttgaaggaaaatgagtgcttcacagccaaaatactactaatgcacaagcaagcactgtgaatgagaacttgcagagataacagatgtggaagcagacctgcacaaatgttagatattagtattatgagataaagtataatatattttaagttttaaagaaagaaaaatgcttgaaaatataggcatgaaacaatcagatttgaaaataaccaaattcagctattagaaattataattgaggccaggtgtggtggctcatgcctgtaatcccagcactttgggaggccggggcggatcacctgaggtcagaagttcaagaccagcctggccaacatggtgaaaccccatctctactgaaaatacaaaaaaagaaaaaaaaaaaaagctgggcatggtggcatgtgcctgtagtcccagctacttggagttgcaatgagtcgagattgtgccactgcactccagcctggacgacagagtaagacttactctgtttcaaaaaaaaaagaagaaattataattgaaataaaaccctcagtagacatgttaatcaggttagacacagttgaggagaaattaatgaactagaatagaagatagatgtgaaggaaacattcagaatccaacatacccagacatgtaaatgtaaatgccaaatgtgtcagaagaaaggttggaatctggagggtaaagtgatttctaacttacctaaccagaactctagaaggaatgggaaaaagtaggacagagacagactcttttttccatattaaaaaaaaaattttcaggtggataaaagacctaaggagaaaggcacactacaataaggttttagaaaaaataaaggagaatgtctttatgatcttgtttgagggaaggagttttgaagacaaaatataaacaaaccataaaggaaaagattgatgaattcaatcaaatgaagaagttgtgttcgtaaaaaaaaaattacacagagaagaaaaaagggaggtatttgtaatgcatataactgacaaaggatatgtgtctagcttatataaagtaaagctgtgatttaagaagaaaagatagcttattaaaaatggatatgaggtctgggcatggtggctcacgcctgtaatcccagcactttcagagaccaaggcaggcagatttcttgaggtcaggagtttgagaccagcctggccaacatggcgaaaccccgtctctactaaaaatataaaaattagccaggcgtggtggcgcacgcctgtaatcccagctacttgggaggctgaggcaggagaattgcttgaacctagtgggcggaggtttcagtgagctgagattgcacactgcactccagcctgggtgacagagcgagactctgcctcaaaaaaaaaaaaaaaaaaaaaaaggatatgagatttgaatggataccatccaaaaaaacttgattgtcctgtccacttatggcttggtgagataagttgctcagtgtaatttctgatcagggaatgcaaatggaaaccaaagtaaaaaaccatttatacccatcagattggcgaaattaagaagcctgctgataactagtgttacccaggatgtcgcacagcaggtgctgtcatgcacttacgattggaaaacattttggcatttcttagtaaaatcaaacattttccagttttgttacctggcagttttattcattggttaaaaaatatcttaatgaaataatttcatgtagatagaaatgtacgtgacattttgttcataccagcaaaaaaatggaaaacaactcaaaagtccagtagtgcaaaggataagtaatactatacagctattaaaatcagtgaacacacctgcatgtaccactgaatgaatcatgaagacaattttgagttaaagaagcaagtcacaagggaatacatgctgtatgttttcatttatatgatgattaaaatttggcaaaaaagaaacaatgttcggtggtaaatctaaggaaaggttggggtgatgaataattatgagagtccttctcactgggctgaaggggtgggagggacagtagaagggctttggaagtattaatcatgtttcgtcctcccaatccgatgtaccttgctacatcagcattaaccacctgccacctggattgctgcagcagcagcctcttaaggcttccacaaacccatcttccagccacccactcgtggtctgctgaagtgccagtctgatagtattgcctgaacaaaactcctcagtggctcctctgcattggaggatgaagtctagatttatgagcttatttcctcatgccctctccctgccttcacctctagcttgtaccctgcacgacctgtttgctacacacagtccctccacagagccatgcttcttgcctctgcactgcttctcatgtgctttcctcttctctgaaaagctccccctttcccctattcctttctcctgatgaactcttagccatctcgaaaaacccaggccacttgtcatccctagaggccttttctaccattattcctcttctccacaaccttggtgctttgtgctgtgtgggaacgtttcttaatgcatgtatttgctcttgttctgtcatccctctagatgaaaagcttgttgagatcaggaactgtatcttactctcctttgtgtttctagggctcatagatgttgaatgaatgcctaattatttaaatgatagaatattggattggaagttaggaaatcaggttccatgttggttctgcttttgactatgccataccaggctcatttgaaaattttctcccacctccaaaataggaacacttgagatgctttattatttgcatattttctttccactcttgatacttctgtctaaatcagtgaggcagggcatgattcctagttttcaggaaactgcactggtcttttagtaatgcagtttactaaagaagagtaaatctcactcgttactgaatgtcagtgacttcaaaaagtttgtgggaaaaatggaattaaaatataaaaataaaaactgtaaactttatttctcaaaataagctctatcaagtttaagacacttttgcccatgatgataccaaccttttagttcatccctaaagaactgagggtcctgtgaattgaaccacgtcaaatgcggtcttttacattattaacagaaatgagtgccctttaaagatttttttaagattaggaaacaagaataagtcagaaggagccaaatcaggaccataaggtcctaatggcttcccatcaaaatgctcactaaatagccctcggatgaaaggaatgaggaggaacattgtcatgctggagaaggactctggtgaagctttcttgggcgattttctgctaaagctttggctgactttctgaaaacacataaaaagcaaacgttactgttctttggttctccagaaaatcaacaagcaaaatgccttggagcatccaaaaaaacattatgacctgtgcccttgaccagttcactttggctttgactggaccacttccatctcttggtagccattgctttgattgtgttttcaggttcatactggtaaaaccgtgttttatctgcagtggcagttcttcaaagtaatgctctaggatcttgatcccacctgttaaaaatgtccattgaaagctcttctcttgtctgcagctgatctgtgtgcaatggttttgtcaccgatcgaatggaaagtttgctcaactttaatttttcagtcaggattgtgtaagctgacccaactgagatgtctgtggtattggctgttggttctgctgtttatttgcgatcttcttcagttaagacacgaacaagatacatattttcctggcaaattgatgtgaatagtctgccctgagggcttcaacattgtttcattccttcttgaaacaagttatccatttgtaaactgctgatttctttgggacattatccccataaattttttgtaaagcatcagcggttttaccattcttccatccaagcttcaccgtaaatttgctattttttctgccttcaattttagcaaaattcatattgctgttacaggggttcttttaaaactgatgtcttgtccttcttagtgcctcatactggatcctgttcatacaagttactacaagtttattttggtgcaaaaaaatggtgaaatccttgcataatttttttcataatacacgttttccatgagctttttgaagatttcttatatatatgtatcttttccaacgcatgaagcattattgaggacaaaaatagtcttaaatcataaaaaagatttatatccaatatactagaaggtctgcctttcaattaactctatgtaacaatttcctagtcccccagcctgtgggtctcttgctggtagcttcacaggtagtcccagaatagaggggaaaaacggcagtgtcacacggaagtgggggaggcagggagctgagtgcctggagctgcatgaggcaggtgtttcctctcgtgaatacccacaaaactgggataaaatgtttcccttctgtggcctgctctctagtcagaaagcttactgggatgagaacagacagtgctcttacccctagatatctcttctttcattaattcacttcatttctccaagtactttctgatggtggtcatggttacaattccaaagcagaaaataatagaggggagatttgttttttttaaatcaaaatgaggaaaggcacatctgaagaagagacaaatatgtacatttttctgaaggtaactattacacatattcactttttttttgaattgtggaattgttcatgagtatgtaaacatagagagagtaatatgaaccctgggtgtctatctatcagctttgacaattgtcaacagctctgtttcccttcttgttttatgtctgcttttaaacttctaaaaaatattttaaaaatttataccacaaagtcatcagtcattccatagactgagagagagacacagtttaggcagtttaggcagggtgtaaaaggataccagaagtgctgccatacttcattctcatatgaataagtcattatgggaggacaggaaagcatgctacaagacgggagaaagagacccactgcggaagaaacttgtatcaccaataaaatgtgcatctgacttttggacagggatagattcctcagctcagcttctactttgctatgagtatctcgaaaagcaaatcgtcctacagattgtaaaaggttgctaatcagtgaaatacgttacagggaattttcacattgattatgaatggaaattattttgtgtctgagagaatatgtacaattttaccttgtctgataaggtgaattataaaatgttttacataagaaataaaccaatttcattataagtaacattttaaaccattcttagtacttactaatttgtgttcttcttacaggatataagtatccagtatatggtgtccagtggcatccagagaaagcaccttatgagtggaagaatttggatggcatttcccatgcacctaatgctgtgaaaaccgcattttatttagcagagttttttgttaatgaaggtaatatgagggtacataattttgttattctggggtagttttgaagaaaattgcccttatctgaacttttgcctacccttttgctctataaatgttttgtaagttctataggtttaactttaaagaataatacaaatgttaaataatgtgaaagccctaaaatcaagatgtaaggtattctaataaaaccaggacagttacttcaattatcatacatgcttcagtgggcagaattcttgaacaacagtgtgaagaatgttgagagttttttttttggtttctttttctttgttatttgttttttgacaggatcttgctctgtcgcccaggctgaaatgcagtgatgtgatcatagcttattgcagcctcaaactcctgggctcaggggatcctcctgcctcggcatcctgagtagctgggactacaggtgcagactaccacaccaagctctttcttcttggatacttttaatttagattcttccccattactctccatttcttagaataatgctttaattctaacagtgtctgagaattaggtgttacttttccaagacagtgatacaaattgaatatatacccaccagtttgtgattttaaggctacctctctgtaggcattggcatactggagaaagcaaataaactctgcctgctgtttggtgatgaaaacacagacatattcatgctgtgttatgtttgtgggaaaaatcgagaatttggttgtagatgcctatttcttagttgagcattataggtacagtaagtcctacgatttaagcagaactgtgtgtagcaggtccttgaacaacactgtttactttgaagtcgtttcattataacattgttagaaaaaaattggttttgttatacatcgttgtgcttaaaagtactacaagaacctatcgatgacgttaagtgaagactagctgtgtaagacagaggtacaaaaacaacttgtaaacggtagagatcactttggtgaggtatagccatttaaagacttaagtgaactttgctttcattccatctccaagcttgccctaagtttttatcaactctcctgccattgctgggaagtcaagtacttcctactgagttcactctgctttagaatcatgcagagctgagtggatggttttatgacaaaaactccaaattaaaaaaaaaaagtatcccatatacagtattagtccaaaggaacattttcatgagtgcgtggagtgaatgagggcagcagtggcagtgccgcatttgctgcagtagtagtcatgtggcatttggtctatgtggtcttttatcttccaacattctttctgaaaatgccgtaagagcctgtatttactttgactttgggagctttaggagctctcacctcctcacattccagctttcatcatgccaaacttctcactgtgcctcctggtttttcataatgctgccttaccagtgaaaatgtctcacttctctgtctgcctcagcttcaccagtttctccatcttttttactcttgtagcatccagtgatgatacaccatataccataaaaacatttttatcatatgattctgtgtggttacgaggctgagctttttgagtgttaggacctgttctgtttatatttccatccccaggctgtgttatcaagtcttgtgtatttgataggtaggtatttgaatgagttgcggagtgagcatagcatgggatatgctgcagggggagtacagcacagctgctgtggccatgcgcgactgtgccataaatcgggcactgctttatttggggaaattttgtcaagcatttgcctccctcccttccttggttccttcttcttcttctttttttttttttggaaagtaagtttgttagagaagtaaagaaaaaaaaagatggctgttctataggaagagcagtcgcatttctcttcttgttgatattttcccacttaataatgctgattgcaggaagaaatattataaaatagtctcttgaagattttgtcatctgatctttttaaaaattaactttttttcttgcagctcggaaaaacaaccatcattttaaatctgaatctgaagaggagaaagcattgatttatcagttcagtccaatttatactggaaatatttcttcatttcagcaatgttacatatttgattgaaagtcttcaatttgttaacagagcaaatttgaataattccatgattaaactgttagaataacttgctactcatggcaagattaggaagtcacagattcttttctataatgtgcctggctctgattcttcattctgtatgtgactatttatataacattagataattaaatagtgagacataaatagagtgtttttcatggaaaagccttcttatatctgaagattgaaaaaaataaatttactgaaatacaaa

SEQ ID NO: 292 - DNA, 41116 bp, Homo sapiens
catacactctggcaatgaggacactgagctcgcttctgaaatttgacaagataaccactaaaatctctttgaattctatgttgttgtgatcccatggctacagaggatcaggagttgacatagatactctttggatttcataccatgtggaggctttcttacttccacgtgaccttgactgagttttgaataggtaagtgaaggagaaggaggcactcaaagaagtcagccacagaaccagtgtgagaaataggaaatgagcttttttaagttttgcaaaggcagatcaggagagttgacctgtggagtggagagtagtcataattttaaaaaatggccatggaaattaaaactgatcagaaatggctgggcacagtggctcacgcctgtaatcctagcactttgggaggccgagttgggcagatcacaaggtcaggagatagagaccgtcctgactaacacggtgaaaccccgtctctattaaaaatacaaaaacttagctgggcgtggtggtgggcacctgtagtcccagctactcgggaggctgaggcaggagaatggcgtgaacctgggaggcagagcttgcagtgagccgagatcgcgccactgtgctccagcctgggcgacagaccgagactcagtctcaaaaaaaaaaaaaaaaaaaaaactgatcagaaatatgaattccataaagacaagggcaaagtcatgtatttggaagggaaaatgttgcccaagtagagagtttctgggaatatgatcttgaaataaaaataaatgtgagataacctattaatgaaattgtctgaaaaccatacaaacaccaacattatcttcatgatccctagttctagacctctttggtcactgtaaaattataacattttccgtgtatctttaacagctttctaggaaaatattaaccaaaagtaccggttttgatttggccataaagtgacaggagaggtaaggttctctaggattaaagaataacgtattcttatttgattcactttaaaaaattattctaaaatctgttacatatctgtcctctccaggatgaactttatattggctcagcagattgtttactgtgttcttcttctttttctttttttggtctttcctgctcagcgcccaacccaagttcaaaggctgataagagagaaaatctcatgaggaggttttagtctagggaaagtcattcagtggatgtgatcttggctcacaggggacgatgtcaagctcttcctggctccttctcagccttgttgctgtaactgctgctcagtccaccattgaggaacaggccaagacatttttggacaagtttaaccacgaagccgaagacctgttctatcaaagttcacttgcttcttggaattataacaccaatattactgaagagaatgtccaaaacatggtgagttctcatggctctattgggctatttgttgcctcttaaagattagattactgcccgtgaaactgaaaagggaaatcaaaaaaaatgctctgagttgtgagattggatgtttgcctccatatccctgattttggagtcccagataactaaacttaattgaccctggggttcattcagaaaattgttacaaaataattcactggtctcaatccagatgcttggaaacaagagaatattctttataaagttaccaccataattctcatcacagtcaggatttcaaagcatttcatggaaatgccataagttattgagttaataatttcctttagcctacaatatcaataggaatatctaaagattctctacaaatgatatattaactgaaaaatgcaactggaggcttagtgaaagaactagtaattaagctaatcagggcttgggtgaggctggacttgggaattcctttcctctttgtcacagacctccaagggactccaaaaggtcacagaatccaggcagagccctccaaaacaaaaacaaaaacaaacaacaaaaaaactatgattaaaccagttctgacaaatatcagaatgctctgggaaagccagatgctttaacaagtgcaaggatttaggaatttcttctctcacagatcccaaaacagtatccttaagtggtgatccttatgtcaagctgtgagaatatacctcaaaataatagaaggcatccaaacttgatcagtatagtgtcataaagctgctgatgtagaagtgtggagaagtccatcagatagagatatggaaaaaaaagcttggttaaaacaggtttccaaagttctctccctttctctgccattgtggtatgtgtggttgaccatttctcatcatgttttcttacaagactttcaggatcaagcaattcctcgccaaaaaacaaaatcaaggacacgttgtagctatttcttggtgagttaccagaagctgtgaagagagagcatgaggcccatacttttttttttttttgaagggtctcgctctgttgcccaggctggaatggagtggcatgatcatgattcattgcagcttgacctcctgggctcaaatgatcctctcgcatcatttaacatttttttttgtagagatgagatctcactttgtctcccaggctggtcttgaactcctgggctcaagtgatcctcttgcctcaggctcccaaagtgctgggatgacaggcatgagccactgcacctagcctaccacacttactctttgcgtggtctctagagcttcttcagcccccctgctgccagggtccctagggtcttgggcatgccccatttctgaacctattcctgtctccagggatagagtcacagtgaactcagaccagggtaattctaaactgctattctgtatatacccaaggaaatttcatccctgtctctaatgagtctgtcccatgccccttaatacacatgaacacctacacacaggtacaagtcggggaagatcactgtgcagcacataaaataaaattcaggggcgagcactttttttcccatgagataaagttaggaaaaaataaaaatgttcatacagattaaaaattttaaatgttaaaatattaaacccccaatctaaaataaagaaaaaataatttcttaaatcctaagcttgagttatggaattcacattcttataatttacattacctattttgttaaatggaagacttttttttttaatatgcaagtacctgggcatatttagaaagtaaccaaggcagcttttgtctttgaacctgatgcggttttgacagctctatctggaaattgagccagcatatgggagccaagggtgaaagttttcctgggagatttgggctccaaggtactggatagatgctaaagattccattcagtttttcattttctgtcttcatggaactctcacacctacaggggaagaaatggtttagaggttactaaaagtatatagcctggtttaggtgatagtgagctatagaaaaagagaaaataagttgtcaatactttaaatctcaaacaacttcttacaaaaggattttaatagtttaaatacaattatcacaagttgggtaaagacaaccagacctatggcctgataaatcatgtatttaatttatgcatatagttagggccaaaaagagcagagtatctttttgaatgttttaaaatataatctaggattttatgcctacagtccttgaaattacaaaggatctctctcaagttgggaatatgctatccattgcagttacggatgggatttagagactgttttaatttcttgtgattatctcaaacaacgtgttccttactcccaaaactcccttgtatggctacagaaactgttgcagttttagttgcttctcccctgcctttgcccagaggtagtgtggaatgccaccaattttatctgtaatggttcctttcaagcctggggctatgtaagctgctatatatgcttcattccattcatcattcagtctaaatatagctatcaaccactaaattatctgataggtatgcatgaactgactgattctttgcataactactaagctatctgttttatttaggcttgggagccctagggtaaggatacggaataaattgtaaatgatattaaaagaatagcttggcaaggaataatacctcctcaggggccaaaatgcaaggcaacacaaagtgatttttttggtgatataattataacacatgtagtatggtagtgataactaaaataaaattggatagcctcaaaattcctacatgtagtatgataaacaatgttctaagactgaggcctttgggaggtagtgagttatttcctatagatagagagtaaaattattcctataatttggtatgaaagttttaccagaaattttgcttcacagtaaatcatctggattgggtgaagccaggtagggattgagaagtgagtcaggtgggttgcatagatgagtttgtgctgcagaccaaactcctcttcccatagctcacttcttcccactcctgcatgttagagagaagactagaatgtgtcaaatacaacctataggataatagttcagagcattagcttcggaagtaaacactaggttgatgccctggttcttctaatttctagctgtgtgacctagggaaagttacctgctgtgtgcctcatttcccttatttgtaaagttgagacaataacaactccctcacaaggttgttgtgaagattaatgaaaaagcagtttctgagaggttgtgagtgttcagtaaagaaagaaattgctttcctttttttttttttttgagacagattctcattctgtcattcaggctggagtgcagtggcgtgatcatggctcactgcgcctcgacttccccaagctcaggcaatcttcccacctcagcctcctgagtagctgggactacaggtgcgagccaccacacctggctagtttttgtattatttgcagagatggggtctcgccttgttgcccaggcttgtctcaaacttctgggctcaagcgatcttcccacctcaacctcccaaagtgctgggattacaggcatgaaccactacacacagcctattttccattttcactgccattattttctctgtctcttgtgtggctcattactgccacttctgtgcaccatttccatcatgtcacatgcgtagtcaaaaccctcagtgactgcctaattctcagagggtaaaagtgaaattccttggcctggaaagtgcaatcatgcctgaagttctacctgtgggagctgtactagttatctattgtgtaaaaagttaccacaagcttagcagattaaaacaacacatatttaatatcccacagtatctgtgggctaggagtccaggcacagttcagctggatcttctgcttctaagtctcatatggttgcattcaaggtgctggctagagctatggtctcttctgaggcttgactggggatggatatacttccaagccaatgcaattactcagaggccgtctttaattatttgccatgtggccttttccatagggtagctcacaacgtggcatcttgctgcaacaagtcagcaaaggagagagtcttctatcaagattaaagttaaaatcttatgtaacgtaaacatgacatcctgtcacctgtgttgtatgctattggttgaaagtaaatcacgggtctgctcatacttatggggaggggatcacacaagggtgtgaccaccaaaggcagagatcatgggagcattcttagagtctgtctgccacagggccaggatcaaatgctggtggctgattgccagctccactgtttatttctctcagccgctttctgtatgtacaaaaaaggagagagagtgattttctacctcatagtgttgttaagaaaatcaaatgaggtaaattattttgcaaagtattctctactcatctgactcctacctactttcaggtctgtcttaagttgcaacttctgcatgagggcttggccaagtatggtcacctgcatgaatttcctctttcttgtaacagaaactgcttggcccactcataatttatacattattatatactcttatgtttcattaatgaaacatttataatgcatatcttatctgtctgataaaatggaaagcaatctaaggacaacgacttttcccctatacataacaaaatataaaataaatcataacataataaataataaataaataataaaataactaacatttgttgaatgattaggatgtgttaggcactcttgtaagcatttcatttttttgttacttcttcaaatccttacaacagtccttggaggtaagtcctattattactttcattttgcagataagacaactgtggctcagagaggctaaggtacttgagtccaggagcagaattcttactttcctcaaacgttatctcttttgtgtggtctagggcagtacaatataccaagtagttgctcattttggtctttggtaaatggaaatgaatttgtaagttgagaaaagactacactacagtagtttggagaagtccactttccaactgatgttcaagattcaggagggggggaaatgtgtcctggcatcatcacttgcttgatgatttcttttgctggtagaaaatcaccatggctaccaatggccattttctgggaagccttttttgggaatcctaacttaagatcaaaatccctgggctaagtcacggcagctaggaggttactgtgaaccggttctcatttcttatggtttccattgttattagggggctgtattctcattaagtccactctgagctctactggattctctttttagagcactcgtctttgaattcttggccaactcatctatgtcacagcactaaggctataaattccagggccccacaatgtggattatctgtgagaattcatttccagttctggggacaagacccttgggaaaaccaggcaataggccagagagagacagagagagagagagtggtcaaaagtggcctggtcactcttaacctaaaccttgaccttcagcggagtagaggactaaatcactcaggaaatattaaatgtttcaccagatattatttggactatatcttctgttctatctcttcaagcaatgccattccaacttcaattttcttttctgtcatttcagaataatgctggggacaaatggtctgcctttttaaaggaacagtccacacttgcccaaatgtatccactacaagaaattcagaatctcacagtcaagcttcagctgcaggctcttcagcaaaatgggtcttcagtgctctcagaagacaagagcaaacgggtacgtttgtgaacattttagcattgatcccaagagttgaaatatttgggaaatattaaacattaatatcacccacagcagctgcctttatttgaaaaaatagtaatgctgatgttagaaaaatctctctctatgcctaggtaaggtgtccatataatttattattcaaactggaatctttgagagtgaaagacactggtaattattatattcaaacacagagttaaactgagattgtccctggcactgtggtgtgtatggacaccccctagtgttaggtcaccttcctgaaggatcaggcagcctgaagaatacagttagtttatgtcagtggttctcaactgggggtgatttagccctccggggatatttgacaatgtctggagacgtttttggttgccacaaatggggatactgttgacatctagtgggtagggatgctgcagaacatttcacaatgcatgggatggcccccaacaacaaagaatgatcttgtccacaatgtcaacagcaaacttttttttctgtaaaggaacagatgacagtaaatattttaggttttgtgtatttaggtattgtctgtgttgcaactagtcaactgtgctgttgtatcaggaaatcagctgtagctaatatataaatgaacaagtatggctgtgttcaaataaaactttacaaaaacaggcagcagacaggatttggtctgcagaacacagtttgcagacctctgatatagcctattgaaatatttttaacctaaaatatttagctatttaaaaagaaagtcttctttctcagttgcttgtcctctggaactttgtatgttctaatctgtgaatataaaaataaaaatgcatcaaaaaggcaaagataaaaccatgtgaaatgtatctttctacaagttaacatttatttttctgcattctttgggtccaattatccaactaattatcaatgcactttactttatccattctatgtttctccattttttcccccaacaaggacactataagaaaccttgcccattcgcatatagacaatctggtctagcctaggtggaacctagaaattctattttttaaaaaatccccagataattctaatgtgtagccaggactgaaaaccactgaaatgcatgtaagagcttaaagtgtttgggaagaggagggactcaaggttgcttagatttgatggagaggaagccgtggagattgaagaagagctggagagagaccatgaggggttttgtgccatggtaaggaatttaggtttgttcctttggactatgggatcgtgtggaagttttaaacataggatctatttcatgttttaggatgactctcaaggcagaaccaaagggaaataggagaaggagaaacagatcctttaatccagtgcttcttaaatcaatctgagggagagaaccatttccttccttccttccttcctttcttctcttcttccttccctccttctctcctccctcccgtctttcctttctccctcctttattcctttatttccaatacattgcagatcaatacttgcttaagttcattgattacatgcttagatgtcatggaaatatcaaattgttctccaaagtttataaacttttattctcttaattcctgtacttatcacagaatggaaacaaactgtcacttgcactggtccacggattacacctggagtagcactgcttcactatatcaccttcactttatctgcagggtaaagtttaaaaactttggtatggcatagacggtccctcgtgatctggcccctgcttgtctctccattctcatgtctttcatttcccctaatgaacaccattgctccagtttcattcaacatctcactgtcccctgagaatgccttgtcttttccaacctccttccatcttttagactcttccctctacctcccttctctacatgaccagtgcctacttcttctccaagacacagctcttatcttcccttctctttggacccattcttgaatctcctggttattagttattaatttctccctgctcctatactaccgcatcactttttggtgacagttatagcacttgtcattctgttatgtattaatagttattgatttcatggctgcctcactgtcctatgactttatggtctttgacttgttcacttcagaattgtcagagtgtaggacatattccaggttcaataaatgctgaatgaaacaaaaaatgcacctctctgtgtatgtgtggataagaaaacttctttgggttttggtagatctggttatttcaattactccatatatatttattatgtgcttatagtactttgtgctagtcgacagtggggaaacttaactgggctattccttctccacatacagaaagatacatggcaaagaagtaaattgctgtattttgagtaatcaaaaaatcatgtggtcaaaaggatatctttatattagcattctcttcagcaaaatttccattgttaacattgtttattatctttaatttgcagttgaacacaattctaaatacaatgagcaccatctacagtactggaaaagtttgtaacccagataatccacaagaatgcttattacttgaaccaggtaggctactaatttttagtagtgattatgaaatttacttttctctcagattttaaaaatgattgcagatatgtgtgtttcaacacatagatgctcttttaacttttagtaaaactttcttgtaaattgtatcacatttacttaatttgatcaagtcagtaagtaagtcatttcagtggtttattttctctgcagacatattttggaactataagggcaaggacatgaatgaatcatgagattttatttaaccactttatgacctgatgtctgccaaccttacttttaattctttaaagttcatgtagttctttacaaataaaatttttacaaaggcatcttttcttgtctttgtgtgctttgggataacaggtttgaatgaaataatggcaaacagtttagactacaatgagaggctctgggcttgggaaagctggagatctgaggtcggcaagcagctgaggccattatatgaagagtatgtggtcttgaaaaatgagatggcaagagcaaatcgtaagtttgctgatctgtagaggtcctgaagctctctgtgtggccacggggctatttcttctgcattaccaagcctgccctttgatatcagggatacccctcaattaacaatcatgtcctcaacaattcagattacctgttttcaaaagaaattactggggaaaaagaaaaggtgcactggcattctacaattcaagaagctcaagaatgagactcaactacaaggcctaaagtaaattatccaggaattatgaattataagtaatctaggaagatctcaggcccctaaaagttcccgagggagtctggggattaagggggggaatcccatttctcaggatgaaagacagagtcactgccttttgtctaaagcccccacagttcactttcaaaggtcatttgtgtgtctaccttagggtgataccccagaaagaaaaaatatcagattagtttaggctggaaatgtattattttctgcagttgtaattatatctcagattatgtggtcataaaaaatcttaacataggaaggaatttccatatctcttaacttattctcttccctgaatagtgagctgaagtcatggaatcatgattcacattttgctttgatgatttactgcccactgaggttgagtaaggaagaatttttttcccgcatttgttgttttaacatttctttcactgccacttaaattcagtattcttaagccttaggcaagctggagacaatagcttatcaccatttttaaaacaatatcctgcatgtcctttcatccaaatatttatttctctcctcatcttcctgatcattaattgccaatgtgaatgtaaaaataaaaattattaaattatgtttacaaactttattagctaatatcctgacacaagcttgtgttttctgatggtgagatactaaaggaagcacatagaaacatgctattgatacatataatttgcaaacaaacacaggttcactgtggcaaagtctaagatgagttgggtctgatctaaaaataaaaggccatgaacaaaagaagaatttaaaaacttagagatccagtcacatattttaaagctaaagatacaaactgatgtatcaagagagtacacacccagggttaagagactaggaatgtgcttctttcgcttaccagctgtgtgatcttggacaagtgatttaaccactctaagcacaggttgttggtgggaatataaactggtgaagctgttatggaaaaatagtatgaggattcctaaataaattaaaaatagaattaccgtatgatccagcaatccctcttctgggtatatacctaaattagatgaaattaccacttcataaagatatctacactgccatgttcactgcagcattattcgcaatagccaagatagggaaacaacctaagtgtttgtcaagggatgaatgaataaagaaaccgtggtgggtatatggaatgggatattattcagccttaaaaaagaggagatcctgtcatttgcctcaacatggatagacctggaggacattatgctaagtgaaataatccagacataaaaagaaaaatatggcatcatctcactcaaaagtggattctacaaaaaaatcaaatatacagagatagagtaatagtgattaccaggggtgaggtggagcggggtgggatatggggagaagtgggttaaaggatacaaagtagcagatatgcaggatgaacaagtctaaagatctaatgtacaacataaggactgtagttagtaataatgttttgtattcaggatttttgcaaaatgagtagattttagctgctcttccatgggggggataatgcttaactatgtgagatgatggatatgttaatttgttttactatagtaaccattttattatataagtatctcataacatcatgttgtacaccttaaatatacacaataaaatttatttaaaaataaacataggctgttactctgcacagtgggagttataataatgacaatcttgtatggttcttgtgcttattaaataaaataatacatttaaactcctggcacagagcaagtgcttaaacagagattacttaatgttattattcatttgcatccctttgagttgatgtttatcacaataaaaatgtgataagcctttaaatttcttttaacctcccagcaaggctaatctatgtattttgtgctttctctctttctttcccttatgttcttccctttctctttaaaaaaaaaaacaaacagattatgaggactatggggattattggagaggagactatgaagtaaatggggtagatggctatgactacagccgcggccagttgattgaagatgtggaacatacctttgaagaggtaagcaaggaactgtacacacaaacagttgtggggcagtgtatgggaaagagggacagtgactaaaggcattctggctcattcttaacacattggtcagccattcccaggcctcataaagttatggaatattagagtttgaaagattttagagaataataggacagcccctacagatgatcagaattgcgctgctttcctccttctttcagtcactgaccattaattaccaatagaaagactataagaatgaaatattataagaacaaatggtcctttagattataagtaggaatgatcttcttgagctacctggggctggcactgtcttcctgtgttagcagagctatggactttgctttcttcctcaggacaattgatactattactttgagtaagctagtcttcatagggaagagagagttttgtgaacagaaatgtcccatggatgtttttccttcattttggccccatgcctcccctttacgtgaaccttcaaacttctgatgtgagttaccttgtcacagccatagtttggcagagctatcaaaaatggaagtaagacaaacaactccccaaaaaggaaatgggaagaagacttgaataagtacatcatcaaagaaattacacaaatggcaaataggcaaataaaaagttattagggaaatgcaaattaaagctatgatgaaaatccactccacacccaccaggatagctatgattaaaaagatggacaataccaagtattggggagaatgtggagacactggagccctcttacagtgcaggaagaaatgtaaaatggggcagtcactttggaaaacagtttggcgatttcttaaaaagttaaacacacacttaccatgactcttaggtttctatatgaaataaatgaaaacatgtgtccttatccatagaaagacatacacaaatgttcatagcagcaatattcataatagccccaaactggaaaacccagctgtccttcaactagtgaatgaataaacagactctgatatactcaaagtagccggagataggagtggaactgactacaagaaaccttttgtggttatagaaatattaaaaaactagatagtggtgatggtttcccggtagttttaatttattgaaactcatggaactacacacttgaaaatgggtggcttttatagtatgtaaattatacctcaatgtaaaaacaaaggaagtaggtaacaatcttaaaaatgaatatatattttttgcatctgcttttattttgggacctgtgttctcccaagtatgtttattggtttatgcagtggagttatcatcaagttctaggaagaaggaatacttttaaattttccagaaatttgagagaagaagaattataatttggggaaattctacttgtttaaagaatctcctatttctagtgttgtggaatggaaattagaattggttactctttgtcttaaactttcttcctgggcttttcagattaaaccattatatgaacatcttcatgcctatgtgagggcaaagttgatgaatgcctatccttcctatatcagtccaattggatgcctccctgctcatttgcttggtaagaagccccatgaattcttcgtgtacttggctctttgttatttctaacaataaaattgcctttttgagtgagccttaacataaaacttttgaaaaattctgtaagtggttagtaacattgtagaaatcgcattttgaaagcattttcttcaaccaaaagtctattttaaacaattctctattgtattactttttttgtacataaagagttattattttggctgcaattcaaatgataaaggggttatttaagataactagagaaagaattacaggctcaaatgagagtggaaatggggaaaataatttttagtattcaagttgattggctaagctcttaaggtggaatttgagattttagtatcatattgtcagagcttggttggctgggggtggtcaggggtaacagaaggttatagcttgagcgaaagcttcctaagttcattctagacttcaccaattactcttgctgaaaagtgcttggcttggaatcgtataagtgaagaatgaatgaaagtgaccatcttcccctctcccaccgcagcagctgaggccaaataaaatataaatatttgaaaatttcatgccatgcatatatagcatttctactgtagtcaaactaagttgctggaagctaatctcctccacagccatacctcgtgtctgtcagcaggagagaatgcggagaaaggacctgtggaggcttttaactctaaagtaatatggaaatccttcctacaatgtcaatggcaagcattatttagtaattcagtttctgcttaaacctgtctggtgtgatgggataatttcttcattccaatatagactaatttactgctacatggaaccaatgtaatacaattctaccttatgtggaacttaagcaacacccctctgatgccttccattcattagccctatttccatgctatgaggttacccagaatgtcaattcctattctacaagatgaccttccagatattcataaagaaccatcatataagatacagcatagtacctggtgcaatacattttagtgactattattgttattgtcatgtttaccctattttcttttgtcaagttaaatatcttatacattatcaaccattccttaaaacctcacttttctataattgttctcctttcaatgagctgtactttgtcaatgtccctcctcaattatcatgcttagagatgaacagttactccagatgaggtttgaccaacataaagaaagacatggtaccatgactacctttgttctagacactatacttctattgatttagctcaagttcacatttatgctttagaagccaggtcatactgtttgttggctcatttttggtcttttacatgtggactgtgctttagcctgatgtcacatatatgtttttatgatggataggtttttctttaaaatttaagcataggacttcacatgtatcactactaaattttatgttttaaaatataagtttagggagtacttttatttttttcagagtctcgctctgtcgcctaggctggagtgcagtggctgatctcagctcaccgcaacctctgcctcctgggttcaagcgattctcctgcttcagcctcctgagtagctgggattacaggctcaagccgccatgcccagctaatttttgtatttttagtagagacagggcttcaccatgttggccaggctggtctcgaactcctgatctcaagtgatctgcctgcttcagctctgcaaagtgctgggattacaggagtactcttcatgaagtttgttgccccatttttttggcaccaggattctggtcctgctcttggattgactttttctagatacatcttcttttttatggtccctggccttggaatacaacttaacatttgtttgagatgtttacaaagtcaccaagttaagtacacgaatataggaataaaagtggaatttagttaccagttagtagaagttcctgaatgatgatcttatatgatctcttttgaagccaacactaggaattactaacagcttaatttgtaatattttgtaccatggatggtagattatagaaatctctttctaatttacagtgtcaatgatggtccatatatttaataaattatgtctacatttctgctgtgttgtcatatactaacagattcttttttaaatataggtgatatgtggggtagattttggacaaatctgtactctttgacagttccctttggacagaaaccaaacatagatgttactgatgcaatggtggaccaggtaggaaaaagagcccttaaaaactaaatctaaattctcaacttcatttatttttatgtcatccttctatttttatttttatgtgaaaccatgtaaataaaaaatttaagctaattgaaatttatttcttatgtagctatagtttcatggaaaagcagtttacaatggcctcagataacttgaattgcaggtgtagtattgatctcattgaaaggtatttgaaatggagattacctgagttttccattaagcggtaagatgtagaattgtcaactggttggtatcactcattccaaagtttgtcattgctaagtaaccagccagtaatctctatggatagtaaaaacaagaatattatgaggggatttttgcatatttaaaaaattattagtgttaaaaatattacaagaatctttaaaacaattttaagtaacatctttattactactttggtttaattatttaaatgtgctaggttcctcaaaacacaagtaagtacatagcccatggacccaataaagcaactacacaatcgagactacaaagcaaccagctaacaacagcatgacaggaacgcttcacctaacagacagagagtggcaaattggagagaaaaacaaaacctaaccttctactgtcttcgagattcatctcacgtgtaatgacacccatgggctcaaagtaaagtgatgcagaaagatctatcatgcaaatagaaaacaaaaaagagcagggggctgctattcttgtatcagataaaacagactttaaaccaacaacagtaaaaaaggacaaagagggtcattacataatgataaagggttcaatttaacaagaagacttaattatcctaaatatatatgcacccaacattggagtatccagattcataaacatagcacttttagacctaggaaaagacttagacatccagaaaataatagtgggggacttcatcaccccactgacagtgttatacagatcattgaggcagaaaactaacaaagaaattctggaaattctggacttaaacttgacacttgaccaattgaacctaagagacatctatagaatattccacccaacagctatggaatatacattcttctcatctgtatacgaaacatactctaagactggcaacatgctcagtcataaagcaagtcttaataaattcaaaaaattaaaattatgccaaacatattctcagaccacagtagaataaaaatagaaatcaataccaggaggaactctcaaaaccatgaaataacctggaaactgaacaacttattgctgaatgacttttgagtaaacaatgaaattaaggcagatatcaaaaaattctttgaaacaaatgaaaacagagacacagcataccaacaacatatctgggatgtggcaaaagcaatgttaagaggaatgtttatagtgctaaatgcctacatcaagaacctagaaagatatcaaattaataatctaacaccacacttaaaggaactagaaaaacaagaacaaactagttccaaagctagaaaaaaagagataactaaaatcagggcagaattaatgaaattgagacctaaaaaatcatacaaaggatcaacaaaatgaaaagtcagttttttaaaaggataaacaagatggaaagacctctagctagattaacagagaaagagagaagatccaaataagcacaatcagaaatgacaaaggtgacattgcaactgatcccacagaagtacaaaccttcctattgagtactatgttcatatctggttgataggaccaatagaaacccaacgtcagtatcacacaatatacccttgtaacaaacctgcacatgtactccctgaatttaaaattaaaattaaaattaaaattaaaaaattatcaggccgggcacggtggctcacagctgtaatcccagcactttgggaggccgaggtgggtggatcacgaggtcaggagatcgagaccagcctggccaacatggtgaaaccccgtctctactaaaaatacaaaaaaaaaaaaaaaattagctgggcatagtggtgtgcgcctgtagtcccagctatttaggaggctgaggcaggagaatcacttgaactcgggaggcagaggttgcagtgagccgagatcatgccactgcactccagcctgggtgacaaagtgagactctgtctcaaaaaaaaaaattctctgtgttcccttctgttgatgaaatggtattatagttataattatgtatatttgttcattcaactaaaattctacgtttctgagtagaatatctaatcatatttctatttgccttataaaatttcttcagataattgcaccataatttactatttgtgcattgctgaacctttgcttgttaatagttttacatctgtaagaagcaatgcaatgaacatcttcacatacataacatactcctgggaaaagtccactgcagaataaaaagtgaaactgcaagggcctctaaactcttgtagctgttgtagctccactttgaagttgagcagcagtatagggccatcttgatgtagatttttagtctttctaaagggtttttacacccgtctcttctattgtcatctctgactcaggataggtattgtgacagctccatgctataggtgaggaaactgaggctcaggtaaatgatttgcccaaagtcacaaatcacacagcctcattctttctgttttttttgtaccaattaaccatcctcacctgcccctgccaccttcccactactctttccagcctctggtaaccatccttccactctgtatgtccatgagttcaactcttttgatttttagatgccataaataagtgagaacaagtaatgtttgtctttctgtgcctggcttatttcacttaatataatgaccttcggttccatctacgttgttgcaaatggcaggatttcgtttttttatggctgaatagtattccaatttgtatgtgtaccacattttctttatccattcatctactgatggacacttaggttgtttccaaatcttggttattgtgaatagtgctgcaacaaacatgggagtgcagatatctcttcaaaatactgatttcctttcttttgggtatatacccagcagtggaattgttggatcatatggtagctctatttttacttttttgaggaacctccaaactgttttccatagtggttgtactaacttacattccttccaacagtgtaggagggttcccttttctccacaccctcatcagcatttgttattgcctgtcttttggatataaaccaaaaaatttttcataaatataatttgggtggctgcacattattctatttttcaaaggtatcattatttatttaaccattctgatgttcgtttcaactttttctctattaaaaataattctcaatgtaattgttgaatctaatttctgataattttttaggttagttccttagagacagcattactgagacaaagagaagaatttcaaatgctatccgtgtgtgttatcaaattaccttttggaaaggttatgccaatgtatatatccaacagaaataatgctgctattttaaaaatgacattagcacttttttccattttaaaattttattgtaaattgacatttattattgtatatatttatggggtacaaggtgatttcatgatttatgaatacaatgaaaaataaataaagctaattaacatatcaattacttcacatactttttttgcagtgagaacatttgaaatttactctcttagcaatttcaaaatgtacaatgttctattattaactatatttactatgctgtgcagtagatctcaaaaaaataaaaccaacttattcatcctgtttgagactttgtacgctttgaccatcatctccccgttgcccccaccccatagcctctgtaaccaccattctactctctgcttctaccagttccattgttttagattccacacataagtgagaacatgtggtatttgtttttcggtgcctggcttatttaatttaagaatgctgttgttttgatgctggaattaatactgttctcttttcccaggcctgggatgcacagagaatattcaaggaggccgagaagttctttgtatctgttggtcttcctaatatgactcaaggattctgggaaaattccatgctaacggacccaggaaatgttcagaaagcagtctgccatcccacagcttgggacctggggaagggcgacttcaggtagtggggctgatacttacacaactgatactaaatgggagacaacagaggcaggctgaagtttaacttgaattctttctctgcttttctgagcacagaaaagataagttaattctccttgaactaaggctgggagtccaggagagcacatttgggttttcccaggaaaagaggattgccagcaggctctaacttgaacctgtggacaatctgctttcttggaaatatcatgcatccattggcgttgtatggtaatggggatggttgcacccatatcaggaaagatttggtgctaagatttttggaagatggacatatgaatcacacattgatcttcccctccatgtttcactcttgtgaatgagacagaataggtgaataaatacgcttggatcgaagggagaaagtggtacatgtcgtaagagagacacagggcatgctctatggagaactggaagaaaactgaccacatttgcaataggagataggatcagaccgtgctttacaagtgggatttgaattaggtttggaaagacaagaaggattcagatacacagagtcgggaggaggacccaagctgtgagaacagcaggatcaaatacagagaggcaggacctgacctgcatactgaagtcggcaagttaggctagaatgagaaataagtgaaggagagtttgtgtaatgtggcagaatgagcacaggcttcagaatcctaggtgtgtcacttaatgactatgcaaccttggacaaggtatttaactttctttggtttcagtttccttattttataaagtagaatagtaattcccaggttgcaggcttgtgagagccttaggttggattccctagcttgaaaaggagatcgttttacaagtgcttcattgaggagagctctgaggcagaggggaatgagggaagcaggctgggacaaaggagggaggtaagtaagaatgtgatctttactggaaacttggcctcagccttatcccatgaagctctctggagcataacttgagccacagactaggccacacctcaagacaagggggctagccttttatatcaggcagtctttggctgtggactgccccagagtatgggggagcataacccccatttagccaaaggcagtgaagggagcagctgtaggcccttatcagctgtgactcaggcagctaggggatggtggataaagtcttggcaggcccgcaccagcattgactagggtagggattggatctacagtccttttctgtaaagggccagatagtaaatagtttaagctttgcagatctctgttacaactactcagctctgcctttgtgacatgaaaacagccatagacaatacacaaaccaatggatgtggctgtgtgccaataaaaatttatttataaaaacaatggctggccagcaggccatagtttactgatgccagtactagagtgaggcttaaaaatgagaaagtataagtaagttttcaagcacagaatcttacatacagtaggcggtaaatatatagtagttatttttataattatttcaaaagagaatagagagaaaccaaattagaaaagtaggttggggttgtgaaaggaaaatagatttactgagcatgagatgaatacataactgaatatttccttaccttccccctttctcttgcaatgtgtgaattaccatgccctcccactatcctctccagctcacttttctcctataaatgttgaagccctcaaaattatttttggagaaaggcacaaaccacagactgtttctataaattctgtgttcttttcttctgggcatgttcttaaccttggcaaaataaacttgtgaattgattgagacctatctcaaatagtttttggtttacagggtcatattggtgtataaaaggtggctgagtttattcttgagcaatgaggaggcctcgcaggatattggagggggtggtgacatgatccaagtggtatgaaatacatttaggaatctactgatgtatgacccctacacccatctgaatgaaaatgctcttgctaagttaaaaaggaccaccatctcattgccaaatgcagttcttatcccactgggctatagcagcattagacaagatttacaagttgtctttcaaatgctttttttttttaaccgacttccacattgtcattcttttccagatttccttgacctctctgattgtactttctccgtctcccctgaataatcttcctctccccactccttaggtacttggaccttctaaaggtttatctttggtcctcttttcttgcattctattcctgttccatggcccatcatatctatttcccaacttacatgctaatgattcccaagtttcaatttgcagccccttctactatttctctatcctggcaataccaaacagcgtgcagtgtcctgaatgccacatttccacccccctgcccctaagcctttctcattgagcactagaacgtcaacttccatgtcatctaccgggcaaactcctgcacattgattaaggtccaaattgctcattgtatcctcagtcatgcccttcttggtgcttctagggaactgtgcctacattcactcatttttacgctcaaggctgtgtgtactgatcacttatagagtacttgcctcagagttcttgtagcggagaactctgcttatctgtcttcctgttagtctatgagcaagagaacaggattcagctgtgcccattgctttatattgagcaactagtattgtctctaggacataagaggtgggtactcaagattcactggtgaataaatcttggaaagatgattcatgctaccaaaaccccatacaactccactgtaatggttaaatgaaagtcagtgagattcattttcatcttgtccattttcatgcaggatccttatgtgcacaaaggtgacaatggacgacttcctgacagctcatcatgagatggggcatatccagtatgatatggcatatgctgcacaaccttttctgctaagaaatggagctaatgaaggattccatgaagctgttggggaaatcatgtcactttctgcagccacacctaagcatttaaaatccattggtcttctgtcacccgattttcaagaagacaatggtatggacattttctcatggcttgttttggaggttctttaatctgatatgggaaaaggtatttattatgtaggaaatatttactttttgccacataaggtatgaggtatttatgggtaactggaaattactactggtgaaaaaatttaagtatatatcagaacatgtcaacttttggttttgtattattgaaaagggaataagagaggtaactgaatgaatggacttgggatcctgtgaaatatctaacagaagtttttttcttaaagatgatgaaacagtctcacagaactgaaatggcttgtccaattagtgtcagcattctaactagacccctctggttctaggtaaaaacttcccaaaactttagagttggaatatattctaaaaaccattttatagaggagtaaactgaagacaagagagggaaagtagcccgaagtcaaaacgcaatgtagtggcggaaccagaacaagagccctaatctaaagtcttttccataatattatgcaaagcaaagtgtagctttaaattttggaattcttaaagaacaggtgtttaatatcaagattagaagggattgaaacattttgttcatcctgctgaagcgtgaatttcccctgtaacatccccttagatctgtgctatccttcaacatttctgcctgaggcagcccatttccttttagatgccttggacttgatggaacatgacaaatgttcaggagatccaatttcttcagtgaggatgccatggcttttgattcttcctcataaatggaggacaaatagagcctaataccttcttctcttctgtatattctctcccctatttttagttatttgtgacataaagatcagctcctctgtctggagcatttggtcgatgaggtcaaggtcatgagctccatccttgagtagacaattcactttgccttgatctctggttccagatacttggtgatcccacaagggcctgggagtgagccagtgtaaagcctatcatcatgtttgaaatagttactgtaagcacagtcctagtggattacagaccagtagcagcatcctcccatgaagacagtaacaaacaaaggtagttaacagtaaccatacctgcttcctaattttaaaatatcattaattcaagtcaatgaacagatattttattatttttaaatattccctgacagcaggtaaaaatggttgatgactatgtttcttaagatgatattagatcagtgatgaaataatctgtacaacaaaccccatgacacgagtttacctatataataaacctggacacatacccctaaacctaaaataaaagctttttttgtttttttttataaaaaagatagtattagacatggttaaaccaccggtttggaaaactcctgctttttttcttgactctgcccctgatttgtgaataatgttaaataaattcctttattccttccattcctccctccctctttctctttctttcttcttccaaacatatttatcgagcacatactgtgtgcaagacatttttctagacactggagacacagtgatgtgaaaagtagataacatcccctgcttacatttcaatgcatttccttcatacactagagatgaactccactgcctctttatgtcactaataaaggataaaatgaaataacatgatttgttaaagcattttaaattcttggtaaggaagatatccttacatttaaagtacattgtacttttcaccatccagtggatagtgccctccaggagggctcttttgtttcatttcccctccctggtttacaggcttttcactgaatctgtttagtatttgtttatttaacaaagactcacagaaggcatcacgtagcagacatgggactaagttatacagtcttaaatgagacattaacagtcactgacttcatggagctttccagaataaacagtgtgactgggaaagtggatgaaatagctctaatgaactctgataagaggtatttaagggaggaaactgaaactaatgaagaaaatgaggattagaagtaactttgggttttatttacctgttctgttccagggcttcaacctactccaaatcccttagctgagaaaataaatatatacatatcattatgaatactgtcaatttttctcatgtatccttatagtaagtacatcttgaggaataatattttgaggttaggaaaattctctttaacacaaaacatccactgtcatcttcatcgtaatatttatccttttctattttactttcagaaacagaaataaacttcctgctcaaacaagcactcacgattgttgggactctgccatttacttacatgttagagaagtggaggtggatggtctttaaaggggaaattcccaaagaccagtggatgaaaaagtggtgggagatgaagtaagtcaatgaatatgcaatcagtaaaatgttttctaatgagtttgctgtgtatttaaaagcatttgactggcgtgtacacacacacacagaggcacacattaactaactactttttgtatttttagtttgttatattttatattttagtctccatttggataccatctcctcagataaaatttccttgggtcaggtgacactacttcatactctatattcttaagtattggcttactcattaaactatgatattatgttgaaagtgatcaatttattcattttacatattcttttatccagccttttaaacaaaacggtgaccccacattttaggcaaagcactggggatccaatgttaataatttcaggtatggtcctcaaccccaaaaaacgtttagtttatggcaggatgtggaaaattaaaccactgcaatttgtagtgttgtgatgggagggtacagggtccgttagcgtccaggggagatccaaagcccaactgggggtgtcagatgaggagaggcatttaagccctgagaaaggtgtgggtgtagaggggaacacagagaattccaagctagagagaacctgacacatttgggcaacagtgaccatttccatggttgcagcactacgttacttattgctgtgtcacaagtgcctcacactgtgcctgtcacatgcaagtatgaaataaataggtttttggaggaaggaattataagagaaaaagaaaaagaaggaaaaaaagaaaggagagagggagggagagaatggaaacaagaaagaaatctatcttctttttaccatcatagaccctggtcaattatttctttctttatttttcttatattttctttttgaagtgaagaactcatgtgtaacaagcagttccacatgcacaggtttaaaacagtacacttcttctgtcaagattctctctgttaacataaatcgtacttgggaggaaagacgcagcacctataagaactgttgccagtgtttaaatattactgaagttatgtctacaatgatcctgcaattttaaaggaaaaatgtattccatttaatcaaagccaaatacatgattttgctacctttttttctggttggattaatcttttgacccctcttagcttattttaaaggcacatggaatcagatccttagagtgattcattaatgcatcaattgttcctttgttcagtaaatataaattaattctttctgtagtgtcaggcaccatgtttgacactggaattagagagaagaccaagacacagccccaccctctaggagctcaagtctctagggcaggaagttactatagttgaataactacaaaacggggagataaatggcaaaggaggcacaactagagaaggctaaaggagattgaggggttaattctgccagaaggtggatgggatcagggccaggcttcacagaggagggaacacttgagctaggtaggcgtggagaataagtaagatttcaattttattaaattctctctgccaggagtacatgaagtgtggtgcctgagaggaattattagggctttcactgtacatttttggccatgcaatgcactttatgaatgttattaaattagtcttttgaagacatagctattttccaagggtatattctggctgaattaattaaaactaagagataactacataatgagctttactgtctgattttttaaaaatttttatttattttttatttttgtaggtgatttttttttacattgtttctatttcacccaacaaccatttctaatgtaaataccattgattggctggacacggtggcacctgtaattccagcattttgggaggccgaggtgggcagatcacttgaggccaggagttcgagaccagcctggccaacatggtgaaaccctgtctctattaaaaatacacaaattagttagatgtggtggtgcacacctataaaccaagctacttgggaggctgagatgggagaatcgcttgaacctgggaggcggaggttgcagtgagccaagatcgtgccactgcactacagcctgggtgacggagtgagaccctgtctcaaaaaaaaaaaaaaaaaatttgattgatgaaactgcactagttatgcccacctgcttgtgatgcttgtgatgggtgatccacagctaatgtattgttttcttttctccccaaaggcgagagatagttggggtggtggaacctgtgccccatgatgaaacatactgtgaccccgcatctctgttccatgtttctaatgattactcattcattcggtaaattacagttttcttgtttctgtttaacttctagggtttgtggacagctgtgctaataacgacaaaaagtagggataaatgaagtgataattataatttttctatttccacccataactaccaagctcaatacagatgctccttgctttacaatggggttacatcccaataaactcatcataagttgaaaataccttaagaatgcgctgaatacacctaacctatggtacaccaaagcatagcctagtctaccctaaacatgctcagaacactcacattagcctactgttgggcaaaatcatctaacacaaaccttattttataataaagtgttcaatatctcatgtaattatttaatactgtgctgaaagtgaaaaactttgggtacttaccattaacatatacagctgaaagcgctattgtaaagtcgaaaaatcaaaagtccaaccgttgtaagttgggaactgtctgtatagatgatcaatttcaattcaatttaaactaacacaatttattgggttaaattaaacttgtgtaagatcttgtccccgtcatcagcaatcaatagtatcattgggagaaataaaaagtagttttgtcttcttgttactggcagtttattgtacattgtgatagagaatttttaacttgaagtccaaaaacatatgttcttcacctagtaaccccagtccttgaatttgctggagctcagtttatttgtaaaatgaaaataatattatcgacctgttataaggatggatttgcatcatttatgtgaaagggctattaatctgtaaaacacaaaacaaatgttagctaacatttaacagagtaatattgccatgtttatcaacagatacataaaacacaaataggttatgatgagtgtagagttcatgtctggagaaagagatttcagagatttgatcagtatctctttggttacttgggctccagatttaaatatatgccctaatctataactctaagacagtaagtaaacacgggactgcttttttgttgctttgtctcctgtgcagatattacacaaggaccctttaccaattccagtttcaagaagcactttgtcaagcagctaaacatgaaggccctctgcacaaatgtgacatctcaaactctacagaagctggacagaaactgttgtaagaaatacctcaaaatgttgaacctctcctagtattcagtattactcatttccatgcctaggtttgtatttgatttctttgttctaaaaagaaaattttatggcctcaaaatgtcctcatttacaaaccaaacatttaatttgtggtcagacaggaacctagaccatacaacaattgggtgggccacctcttttctccctatcataactacagccctctcttcctggtaattggaaggaaagagcggtttagggtggaatatatctgttaatatgcattcttttcttatctgccagaagcaaatttagccaagtcaaagagaagaaaccatagatcatagatgtaaatatatgtacatctggaacccctcaaaaggccctgaaccccctttttttgtgtagcaatatgctgaggcttggaaaatcagaaccctggaccctagcattggaaaatgttgtaggagcaaagaacatgaatgtaaggccactgctcaactactttgagcccttatttacctggctgaaagaccagaacaagaattcttttgtgggatggagtaccgactggagtccatgtgagtacacccagttgacaagtttcacacccattccttgtctacttcgtctagtctcctttggccccagtctcatgaggacttgtgacacagctgagaatgtttctttctctatagtacctgcttctttctctgctatggtgacagctgccattttatgggagaaaaatcacaactgttgagcacctatgtatgagacatagtgaaagcaactgtacagacaaacacacacagatgcatgcacatgtgtgcatacacatacaagagtgtgtactctttcaagtctgttttattagtctcatctttaaaatacatattataactgtctccaaccaactgtactcgaatcctgctttccaaagacaaatactttttttaaaacaattttaatgctattatctcttctttctggcagtcactttcatatttctaaataattttcttatattgctattttgttattgctcagttttaaaccttcgttttggtctactcttccacttccatttcttgctcttccaataaggccttataatgatttttagtaaaacagttatcaatgtttacatcactatgcctgaagagccaagtaatgtattattttgtgtcctttcttatgtggcttgttgtttgtctcaaagtttctacttgcctgaatttttcggcttacctaatttgctatctacgttgtatttgtttttctcccaaatatttcaacatatctattcttttcagtctcattttttttccctagagacttccctcttggagtcttatattctcctttcccaacatttgttgttctcctgggttgaatccactgcttcctagattccatgtcttctttcttggattacctcttgtttttctggagcatagcctcccacagactgtccaagcaggggcacaaggggtaggaggatcaactgttctccaaagtggttttaaccacaccctgacttccattcctcttcttttcagcccagtattattttcccaccctcacctgtgcttgaattccaaacctcttttggattttttggctctttgtgggtctgtgcctcctctgtgtacaaattaggtcatggcttcctgtccctgagaaagcagttacccctgtctcatcatttctcgttttccaaaagcctgttgatacctttaaaagatccctttactatcactttagtgggatctttggaggaaaaggaaataagcacatgtgggcaatctgttgtctgtaaccagcagtctgctatttctctttaatcagatgcagaccaaagcatcaaagtgaggataagcctaaaatcagctcttggagataaagcagtgagtattctggacagtgaattgattatttttgagtgcacagtcttcacttaaataggacacaataaacccatttcagtgtgaactgaaagaagagaggccatgtggttcttttcaaaactataagttccagattctggcctttggctttgggtttttaaagtaacctattccttattggataagctattcctacttcttattgccttgaaggtgttatgaacttcaatgagaaaatatctgtatcaatccttaaatatcagataccaatcctttcaattgactctcgtcaccattacttttattctagaaagagaatatggttatattttgaaaggtagtttgtttttagaagcggtacagttaggtttttttagtttgttttgttttagtcaatcacctgtatcctggcttcactcagagtgtggcccatggtccagcagcatttgaatcacctggaagcttgttaaaaatgcgtaatttcaagcctagccctggaccacttaatcagaatctgcattttagcaagcctccaggtgatttgtacgtacaatcaagactgggaagctctaatttagaacactgcttctcaaacttggctgcacagtggaatcacatgggaagtttaaaaaatattaatgcctaggttatacacctccagagattctgatttaattgttctggggtatggagtcaagagttgggcatcaagagtgtttaaagctccccaggtgattctagtcacagcaaagtttgagaaccacttatttagggaaatgcattttgggggtaacaaaatattttacaggaaattatgttatttacaccttaatgtgaattatttacttagctattgctctgtcgttaacacctgtctcagatgatccagtctgaggaagtggtagctttgattgggaaagaggagaggaaagagtagtctcgggtagatggggctcaaaagcctgagagtgggtatgacaccctgaaggctttgcagggttagaagtcaatctgggactattggataaaatggtccaagatgctacagcaaattgttgtctgcattggatagatccaaagattgtgtttctacccccttacctttcctgaaaagttaaacattgtccaagattcaataacacttttagtataattttcatagttaagacatcaaaacataaataactcaggagtaaaaagatgaacattcaagaaagaaaaaatgaaaatggaagtgcatttctttccaatcattaagagttcaagttcctatttcataataatcattgggtgattgtgggactatttctctgtcatatttttattagctcttccttggcttaatacattttaattagtctcggcagatcaggatattttcaattatcttttttcttgacatttatactcatcctctttccatgcagtgagggttggtaaatagtgttcagggggtttgattctgtaatgttctgaggccaattcactgagcaacaatctgttttgatgaaacgagatcatatatttagtgcatctacacaacagggtcagaatatctgctcagttcaaactatttcatggtgaattccaatggatctatggcattattttgagaactcagcctttaaaatcttttatattttatatttatagagatagtagccagactgttattagtaacaatattaataatattattactattaaaggaactcctctaaacctcggtgaaaccaagctgaagtgaatgtaacaattcttttgtgaaatattataattttttaaagggaaaggagaaacatacaactagtgccattcattgattcctactgccagctactggaggaaagagtgaatgctttcttttaagtctttaaaagctatgcaaacataagctatttgtttagcactggaaaacaagaacaaacagattagcttgctgtttacaaagtgttatttttcatttgaatgtcaagtttttcttttacacttatagataagtacatttctgagaacgtaccataaaaatagtaaaaactgattttgtccacaaggtacagacattttgctacaaaacccacaacttttgtttgactcccatcggtaaacctacactcaaggtgttaatttcagtttacatcaaactaaagtaaaaggacccgtgaacccaatggttcctaaagcatggttgcctgaccagcagcattaccaccacctgggagtttgttagagatgtaaattattgggtttcatctcgggcttcctgaatcagacgctctaggggtggacccagcactcagtgttgtaactaacccttcaggtgatacggatgcacacttacattgaaggtcactgacttaatgaatagcaagaatctctggaatattaagaataattcttgaggagtatcagattataaatgtgtcttacgagtccctctgagcagtgtctttcttctgaatttgcagtatgaatggaacgacaatgaaatgtacctgttccgatcatctgttgcatatgctatgaggcagtactttttaaaagtaaaaaatcagatgattctttttgggtgagttgatttgctgggttctcaaattactccaactaggatttctcttactcttgagtctgaggagatactctgcctaaacttttcttcaagtgaaattgataaaaatctcctagtaacttatacttctttggtattgtggaatttgggtgactccatagagggctgatcgtgccttatttgactggtaaattgcaagagtattgttcttactaaacagctgtcactctcttctcagaatgctctcatacaccctcagcactgaaagaaaaaaaaggcagaacttcctgccttcattgacctatattctagtatgtatgttgtgtatgtgtctatgtgtgtaatatgtaagtgaaatatagagttacaaggtactaagtgctaggagaaaaatataaaagggtctggggagggctggtgtgtgtgtgtgtgtgttgggcagggggtaggtcaattttaaccaaaatggtcagaaaagacgtcactaatacttgaacaagtatatgaagcaggagagagggagagagagagcgagagagcgagagagcgagagcgagagccagcaatgcagacaatggggaaagtgtctcagctgggggaaacagcaggtgcagaccctgaggaaggaatatcctcagcctgttaaaggaacagcaaggaggccagtgtggctggagcagattagaagacaagtggagacatggccaggacgatgttagggcatagaggaaggagggagagacaaaaggtcatgtgggccttgaaggccattctaaggactttggcttttattctgagttagatgagtagtcactcaagggctatgagccacatgatctaccttattttgtgctaggatcgcttgacagctgtgagagcacagtcctgtcacatcatatggtagaccccactcattaccttcatccatgggtgcaacacgacgttttctgctgggtaggaccaggttgtgggtgtaaatccgtgtgtggtactcagccatttctgcccaccacattgtttgccacaatcctgggccaccgattattccttgttgattctcctgctgttttcagtttggaaattttctataattgaaaaagatgtgggttttatataaaggcagaacaaatagtgccaaaacttgatatcacaatttttatgtagttgatttcatgtgctttgggcagcattaatgttttttttgacaattacatcctctcattgtttgccctcccccatgtctctctatcctgtgattctctctctaatctccttttcaccagcaggggaagtcttcattctcttgattgtgtcctctgtgccacaagtgaagatgtttgttttgtttctctacagggaggaggatgtgcgagtggctaatttgaaaccaagaatctcctttaatttctttgtcactgcacctaaaaatgtgtctgatatcattcctagaactgaagttgaaaaggccatcaggtgacattttactttcatctaagggtgagggggttaccaaatacaacaacaataaccagtattttgtgtgttcttcctgtgtgccaagcattattctgagtcatttacatgtgttacctcatgctacaaactccacgtaattccagaaggatcccacagcaggggaataatcttgatttgagttccgccagatgtaggctcttacaaaagggaagaaaaactatagattacatgttatcaagcaagttaccactatgggcaactagagctcagtcctgctgggaaatgtggagagactgtgtagaatgtgcacctgaattgtcccatcagagggctgaggaagctggggtatttatttaccacctcccatcagttattggctgagaactgcttccaggtggcattaattccccagcatttcagccctgcaggcagggcagatcttgtggtctgagaatgctctctggtaaaggggagcaggtgctggttgaagaaagtctggctagaactcatggaaaatagtaagtgcagaagggacgtggacaggtattgccatcatttgctctcaggactttgatgtaggattcatttaactgcccaaatcctgaaacaaggtaggcaagtacaggattccttacatattgcttggcctctatgctaggtgagggacttgcaatgaatgtttagaagaaacagtttgtccaatttgcctcaattgtttcccacaacagacagcaggagcgaagaatggattgaccttgcagatggtttcctgtcattataaaaaggcttaatatacctactgcttctgggcagctcactaggtggccctctcgagctgcgtcagagtcctgtttaacttcggaagcagatctaagacctgctgggcagggtgtgcctagaaaatctggcttggttggagtgtatgacccaactgtgcccagagactcactcacttcctccagaagacttgtgtctgtcttgggaaaaacttctggctgagatctttatgaaaaagctcagccttcctggatactcagctgcaagctacaggggacctcagactctctgtttccaggatgactcttttcagatcttttctggctgaggttgccaggggttacctgactaattctgcgttgatctctctctctctctctggtggactctgacctcctgacctgggctatacccaagggtaggaagatgagatgccagacactttggtctttgatccagaatgttctccatatcattgtttttttttttctttaaacaatctttatccttttgcctccataaaagtaagccatttcccatcccagtgctgaagaaactggcaaaggtccctttcttatgtgcctccccagtgctacctccaaatgccaataccttttatttggaaaatactactatagagacttggtcataggacctgattcatttgtataatagaagaggtgtatccaattatccgtttccattatttgatataaagtcattgtagatgtactctgacagaagggaaattcttgccaaatatgataactttgcccttaaacacagcagtcacaaatgaataaatgccaaccatttatacatttccacacttacaactcaattttccaatggagctgttgatgaacctaatctaggttgcaaggcatgaaagatgcataattgtcaaagacttatatctttaattagacctatttactttgctcttatgattttaggtgtatattccttttttttttttttgaaacagagtcttgctctgtcacctaggctagagggcagtggcacaatctcggctcactgcaacctctgcctcccgggttcaagcgattctcctgcctcagcctcccaagtagctgggactacagacatgcgccaccatgcctggctaggtgtatattcttatgataagctctattatatcctttcaggaacaatgatataaacagtaaataactacacacaattttattttgtctaagtgtcccctttgctgttttttgcttttgcaaataggatgtcccggagccgtatcaatgatgctttccgtctgaatgacaacagcctagagtttctggggatacagccaacacttggacctcctaaccagccccctgtttccatatggctgattgtttttggagttgtgatgggagtgatagtggttggcattgtcatcctgatcttcactgggatcagagatcggaagaagtaagtggcctttcctagacttaactatccaaaaatagaaagatttagagaacagtaactggaaaattttcagtaagtggtagattgtatagaccaattacttagttggacaattttgcaactaaatactctgatgcattccctagaaatttaatagatcagcagttcatcttcctagtaagcccacacagtaagtatctggcctgggatttattagcatgccctagtaaactccatcccagccacagtgtcatttccctcctacaaagaggcactgcaaactcagcaggtatgggtgggctcagggaatggttttcactgctctcactgctgaatccttttcagtctaaaagtggggactggattgctggagactggattgctgatgggtttgaaccgtgaaattgttcaagaatgggctgtgagatttctttgaaactgctactcttggttttttgtttgtttgtttgtttgtttgtttgagacagagtcttgctctgtcacccaggctggagtgcagtggtgcaaccatagttcactgcaacctcgatttcccaggctcaagtgatcgtcccacctcagcttcctgagtagctgggactacaggggtgtgccaccacacccagctaatttttgtattttttgtggagacagggttttgtcatgttgcccaagcttttcttgaactcctgagttcaagcaatccgcctgcctcgccctccagtgctgggattacaggcgtgagccaccgtgccctgcccaaactgctactctttactcagctttatttctcaccgggtagctcagactctatgtcattctcttagttcatggttaggcacgttctaatttgttcctgaactgaagatcaaagttcattgaggatttaaattaccagagacctgatttctagtcttgctttgctactagatgtttttcttctgtccttaagaaattgactcttgctgggcttatggaatgaaggttaatattttatagcacctaacaaaactctatgcacacctcagcttgtttaaacatattcttgattgaatctctatatttgctagtctattttgctcaattttcttcactatagagatttttcgtttctccaaaatagctccatctaaaatattaggcattcaatgtgtaatacattcatatggttaaaattaaaaaatacaaaggtgaacatgaagagtcttccttattaccttttgcctccaagttatcttcccaaagccaaacaaaattatcagttccttggagatacacacacacacacacacacacacacacacacacacacacagtcttttttcttttttctcagacatatatatatatatatatatatatatatatctcctttttagtatacaaatatatacttttttagtgtgtatatttgtgtgtatgtgcatatgtatatctcatttcttagtatacaaatgttagcaggctataaacaatgttctgcatattttgttttccacttaatggtttttttaaatttttatttatataggtgtgatccaccacacccagcccacttaatgtgttttagagatcattacacattagttgcacaaaaaacttctccttttttctggcagtataatttcccatttcacgaatggattgtaattttgataaacagtcatctattgatgaacttttatgttgtttccaaacatttgtgtttacttaaaaaaagtgatggcttaatataggtaatttcctgagtatgccaatatacccttaagatgaatcctagcagtgggaaagctgggtgaaagcatacgtgcaattgctaattttgataaatattgccaaattgccctcaatagcggctgtaccaatttatactcacatcaacagtttatgaaacttcctgttcctccctcccagcctccttaacacagattcccctgaaactttttgattttcatcagtccgattgattttaacataagtatattaaggcaaccttgctctatttaacaggaaaaataaagcaagaagtggagaaaatccttatgcctccatcgatattagcaaaggagaaaataatccaggattccaaaacactgatgatgttcagacctccttttagaaaaatctatgtttttcctcttgaggtgattttgttgtatgtaaatgttaatttcatggtatagaaaatataagatgataaagatatcattaaatgtcaaaactatgactctgttcagaaaaaaaattgtccaaagacaacatggccaaggagagagcatcttcattgacattgctttcagtatttatttctgtctctggatttgacttctgttctgtttcttaataaggattttgtattagagtatattagggaaagtgtgtatttggtctcacaggctgttcagggataatctaaatgtaaatgtctgttgaatttctgaagttgaaaacaaggatatatcattggagcaagtgttggatcttgtatggaatatggatggatcacttgtaaggacagtgcctgggaactggtgtagctgcaaggattgagaatggcatgcattagctcactttcatttaatccattgtcaaggatgacatgctttcttcacagtaactcagttcaagtactatggtgatttgcctacagtgatgtttggaatcgatcatgctttcttcaaggtgacaggtctaaagagagaagaatccagggaacaggtagaggacattgctttttcacttccaaggtgcttgatcaacatctccctgacaacacaaaactagagccaggggcctccgtgaactcccagagcatgcctgatagaaactcatttctactgttctctaactgtggagtgaatggaaattccaactgtatgttcaccctctgaagtgggtacccagtctcttaaatcttttgtatttgctcacagtgtttgagcagtgctgagcacaaagcagacactcaataaatgctagatttacacactc

SEQ ID NO: 293 - DNA, 275003 bp, Homo sapiens
cgcggggtccccgcctctcgctcaccacacagaccccgcgcctcctctggcagccgcggtggtggcggcggcagagcctcgcccactccaatccccaccctctccatccttagtcattaaagaacagcagcgcctggcacgttcttggaggaccccgggcgcagaggaggaaagggagcaggcgcagggggactggaaaggcagcatgcgctcgccaggagcaacctcggcgcccagggtctgaggctgcagccccagttcgccattgtgagccgccgccgggggagtccgctagcgcagccgtgcccccgagtccccgtccgcgcagcgatggggcacctgcccacggggatacacggcgcccgccgcctcctgcctctgctctggctctttgtgctgttcaaggtaggggagctcctccacccctttttcccagcggtccgggcggcagccgcgctccggcgccctcgctctgccgttgggagcggcgcgccccagggcacgatggcccagccgcgggaagcgcctgccgtgcagcctgggcgcacgctttgttgtcctcgcgtgtgcgtgttcctggtggtcttgagaggtagggggcggggggaagaataagggaagtttgctccctccggctttcgccctttgtgctcttttatcgctgctgaaatccacatcaaaggtgggcttgttggatcgtgctttctcaggcaaaatgaggtcactttcttttctggtttccactgcaccccaacgctgcttaacctttccgccctccctcgcacagaatgctttgtcttaattttccttactgctggaattatacactggagagtggagggggactgagctccctggacacaaatggactgccagggctacgttagggcagaattttctttgaataaggagtgtcaggtagagagcttggtaaggattcctctccccaactcctatcaacatctttacaattccttttaaaaagtctccagactttctccactatatttacagatgatattacccctagatttaatggtggaaaaatatataataataaactttttcgtatcttctttggaatgtgctaccctgaggttttactttgagaaaaatgaaaagcaaaggagttgcttttgaaaaatcagtttgacaactatactgtacataaatttttttgaagaaatgtcagctagatgttttcttggacggcgatgtgaagttctgaagtgattgtctatcactcatgtcttcagtggatctactttagttctgttgttagtcttttcctctctccgcaaagcaaactcaagaatgtcgacaggtgacttggagctatcctttcaggaccacagtgataccttccctagaaatggatgccaggttaatggatccaaaggttttcttattatagagtcacttcttgcttatatgcaccattaattatgaatgcctaaaaagaatataatggaacaggaccaatggattaagaacagcattacttttaaatactccatattttcatttatcttaatgaaaaatataaaaaaaattcagggagaaacagcaacagaatgcctaagtaagaccttaaaatatatttaatatgttttaacattttttcttaaattatcaataatcattaattttaaagtatggtaaataataagctcagttatatgtttttactgtaggaggttgttctttcatacacatcataaatgcattagacttattaggttgtctattagtcgttttctaactatttatcaaactgtcacaactattttacctatgcaataattgtcatgaaccaaaaattagaaaccaagtcactatgcattttacgagcaacagctaagagttatatgtatgacatctgatccaaacctaacgtttagcacaactgcaggtttttgcgtgagttcttcataatgagataattccagaaataagagaatgacttggttgggagtgggggtaaggttttgcaattaaaataaaataaatgtggccattgtttgacttaaaactcgatattggaatgagaaaatgcagttagtgatggtgtaatgaaaatgttagtgattgtcatagaggtccagcctgcttcacataataggtatattcctgaacattgcaggtaaatgtaaattatggcaaactgcttccatagtaaatacattggcaaagtttgccatttaaataataattattgtagtgggacacataattttgtaagaaaaatcattttcctttattttatgtgaatgtaatatttttgtcacctgaatataaactatatcagaggaaagaagaaaaaactgtatatattaaataccttctatgtgctggttttttaggcattttacatacgttatttcatttaatcctattttgctgcagttgacaagagttgttcaaaaaaaatggtaaattgggcacacagtgtaatatcttacatttagaggatagtatattacatggtgcgttgggcacatggtataatctctttataatttggagatatttttgaattaaaggtcctgattaagtgccagtaaaacagatctactcaagcaggttgtgactggaggatgagaaaaaattcattattaaataccaaactgctaactgtatctcaataataaaatccaaaatgttccacgtgtgccgagtcagaaatgaaacattctctcaactctcccttgccaaaataatttccatagttttcactatagttaatacatttttcactactccatatgtgtatcctttatataagagtgaaaattctgaaggaaaataagacagagaaattcaagtatgaggcttaatttacagctttacattttccacaactcaaaaataagcagctggatatcagtggtggaaaagtaggaaagtttgaatgtgtatgaatggctataatcagttccattgagggagactaaatgtgactggccaagaaggtctttgtgccatcgttccttatccatggagcagtgatgagcacatataatcgggcatctcagactgtctaaatcattcactgcacattatgaagctaatatctgcataatttatcttgcctaaacacaatgttggttatgaaaatttttatttttatatcaatattgatggtgtatataaaatagaagaaaaaatggaactctgttattatattgaaggctactaatttcaaagtcttctatggatgaatgcaagtgaggtatttatctggcgagcctcgctgttgtgtgtcttcccataattcccagtgaaagaaatgtaacttcctacacttgtcctatctttactaaagccctcctagaaaatgtcttcctgtatcagtttactcagtataagtactttgtctactaaggtgcaaatcgtggaatatgacatcataggaatttgaagttggccttccctgaaatgttgctttttagtagtcagctggaatatattcctaaactcaagtgcttggcgtgtgtccttcttttttaaccccttctctctatttctttctatttctgcttttaccagagatatcatcaaagaatatcaaatttaaaaagggtcttaatattgtactttctgaaacaggtttatatttaattctataatacatgagtgttatgatactggccattctactcttatccaggggaaatatctgttttccacggtctgtctgcctttcctttcctatgtctcccctcgcaaccccatacacacacacaaagaagtttcacttttcgtggttgaggtttcatccataaattgcacagtgttggcaggtgaaccataatcctttcattttgctggagcagcttagatcctttccatcacaatgaagtttgctgcccttaactcccatgtcatctgactcctttaataaatcatattgccaaccttttggagaaacctttttacatgtgacatccccagtaggttggcaaaggctccctgggccatgcttctacagatgatcgagtaataatccttcccactgtgaacatatgtttccttttgttctttgttttgtgagagactatcgttgtgtgaaggaatgaaaaattcacattacacctctgcctcattttggcccaaaagaaaatgcacatttatgtggataactgattaaaaacaatatgagttgtactttattttaaaatgtaacactatttctactatctaaatatccaacttaaaggtatttaaacgtataagcagatttactcctgaaccttataaatataattctaacttgaggggttgtaaaagaatgtttgatgtcagatacagttgatgcacttaagtaaaacattgtaattggtagcagtgtggcacaatagaaggcttaacaacaatgaccacaagttttcattttcccctaatttaatgcctctccgtacacagtttcagtgatgttgcattttcagaaacatatcccagtgcagtgatgagctttactgtaaagcacttaatgttttcatttaattactccaaatatgttgtaaatatttttgaaataaaggaatgtctactgtaatatttctatctttcatggtgctagtatgtggtgttaggaatttaatagaaggttaataaacagatttaaattttctgcattatataaaagctctgactgagaattatgaaatattgtaatattgacttgtgaacacatctttaaggaaaatataggaaaattatcattatgggagttaaataatcataactacaatgcactcattacattcaaatagtaaaaattttaccaatcacttatattagaatcttattaaaaccataaattaaaatatcagttatttttcccagaaatgtaatattctcagttgctcatttattcattaatgttacctcacctctgtttaatgttattaattaaaaagtagcaaatgacatactaggggaaattgatttttttaacctgtatgggtgacctacaatttcagctagtacccagatatacaggtaatatttttgcctcctcttccacatcaccactccgctatgaccacaaccaaccagaactgaccaagatttctgtgttcctagtagaaatcctcctaatgttttgtcagacatcacccttaagagatgaagtattttctacaccctggtcttggttatccctatggtagtgtttaatccaaggtcgtataacccaatttcttacagaactcttctatagtcatcttaaatacccattatatcagctctttttgctcaaataaatatgtaagttttttttgtgcgctggtgtcattgatttgaggaacccaaacaaggttaatgtggctcaagtaaagtgagcaagagtgtgaatggattgggatgagtgtgaatgggttccttctctcctggtgctgttgactccagcaggtcccatagggtttctatcagccaataagaggtggctcacgcctgtaatcccagcactttgggagcctgaagcaggtggatcacctgaggtcaggaattcgataccagcctggcaaacatggtgaaaccccgtctctactaaaaatacaaaaaacagccaggtgtggtggcaggcacctgtaatcccagttactcgggaggctgaggcaggagaatcgcttgaacccagaaggcggaggttgcagtgagcaaagatcacaccattgcactccagcctgggcgacaagagtgaaacttgtctcaaaaaaaaaaaaaaagtatatgtgaataacctccttaattaaatacctctcatgtaatctgctatcaccaattactcctaatgtttcccttttccaagcttgttctaggtcttcagaacaccaatccttagattttttttcctctgcacattgtacctttgaatttatttctatgagtaagatcatatcttagccttgtgccagaaaagcgttcgcaagtctttcagcatctaattcccgaatgaaagatttcttctttccttagacattctagttacttaaaggccagctcctttttcttctgaatattttaaaaccaccaaacaaacagaagatgtttgaaacaaggttgcggggatttcctgataaaaggtttttttctttcctttttttcaggaaattgagatgaaagggagaaaagtgatatatgcttggaaaaatatttcagaaacagagaatcagaaatggaaataggacttcaagcttgagagcggtattgcaaattatgagtatgaatggtaatttctgtaagaaaatgaatataggggaaattagagaatgaaatgaagaacatttgatgaaaacaaatacactgcaattctatttatatgcaaataaatgtattttcttatcaaatactctttatctatttggtttttcactctttataaataggaatgctgcacagttcatttttctaacaaaactatttctatcttaatgaaaatttaaactaaataaacctatttttaaatgtgatttttggtatatttactagcaaattaaaagaataggaatgcaatttatctacaagtagtggtgcaagatcagaattatattaatagtaatctatatgagatttaaatgatgaatgtttcccttttttgtgctatttcattttactgttttcagataactgagactttgttttattttcctctttctgcctactaagtttttaatatcagtgatttatataacgggtgaggaaaggcgtcatatgactctaccatgctctcaatactgttccttcattattacccgccattgaccaaattaagtgcagaggaatttctgaccctggttctctctacctttaacccgtatcagagaccaattatgagcctgctgtgctgatatgtgtcttgtgattctctcttggttccacgcataggaatttgtgattggcatgtacaaaccagatgtcagagaattcaaaagaattttcagtgccctttgtatcttcggtcctatctgaagcctgattcccacctccctatacttactttctgaatcaatattgtattttgataaactctagtattcctgcttttggatcctggcattaattataattaaccactccttgtcttttagtttccttgaaagagcatcctataaacattttttggctggccaatctttccccaatgccaaaatggaaagattgagaagctccctttcttcttcaatactgtcttttgtattccagaataaagactcactgcccaattccatttagttaatcaaacatccattaagcatctaatatgtgccaggaattttactagatattataggtacagaagtggataatactcagttgagtccctggcagtggcatattgggaacatggacacagatgatggtcattagaatatggtgttttgttttacggatgaaaatgtgggctgctagaggagagacacttaactatttagtggtttgggaaattatttattttaagatgattcctgagctgagtcctgaagcataggtacgagttaggtttaaatatatacacacaaaggcagagaaaactgcacgagcaaaggcccagtgttgtgaaaagcatggcagagtttaggaaaatgcagatatatatcaaaggcaatgaagccacaggagccagatcagggagacttctacatgctgagccagaaagaaggatctctgtattctctaggggaagaggccttatcgaagggtttaatcaaggcattagtgagataagagttgcatttcagatagagcgctttgcctgcaagaaaggctatcccaaaggtagagccagcctggaagaattaaactagtagcaggttgttgaaattatccaattaagagacgacaaacactggcattagggtgacagacagtcaaagagtggcaatgttgaaaaatagctacattggcaagactgattagatgtgggaaattggagagagcaagatgtagggtaatttcttggtaaccaaccctcttgcctggaagagtagcggtctcaagataacatgtgtgctggacagtctactctcgagatcaactgtgctggatagtctgctcttgagatcaactcacctctccactgtgcccagtgccaggaagtgtccctctatggaccatttcttcctgttcccttgccctttggttcctagtgagtttggccaatagaaggcactagccaaagattactgctagaaggagggagaaatcaaatcatttattctcctagcctccaccctggccagcccccattaggcagtggcttcattctctcttccagttctatagtcagcccctcttacaaggctgatgttctggccaaattcctgaaacagttctctgtctttatcccttgagagcaatagcttctccctgcttctagaccctaagtatgttttctccatgcttaatacattatttctgctccaaaccttgatcgctttggctagtccatcccttcatttcattctctgggattttctttttgagtgtcctgctgggaccatgactgatataagacatggtaggtttggtggtagacctttgagtttgaagcagttgaaaacaaataaataaacaaaaacaggtacttgatatgagtctgaagggtagaggagatggaaggcctggagatgtgaatgggatcccctagcagagagaaagggagtgaagggcagtgggccggaagggggtcttgagaggcaccgattgttaatttcaggcaaataaggaatttaagaagttgaaggcacagccagagaggtacagaaggaaagcaaaatcaaggaaacccaagatctaggaaatttcaagtggaggacttggcaaacagcatctaatgcaacagagaggccctataagctaaggtctggaaaatatctttatattaggaaataggtaggctattggactctctggagactgggaggtataaatgcttccgggaattgaagaataaaaaagcagccccttatctgataagagcataggtgccaggtgagatcagagagacctgaagtcaatatcaattctccactatgctatttactggcagtaggatgctgggaaagttatttcacctctctggattcccttttgttcatctcttatacatatgtcttagaattattgtcaggaataaataagaaaatgaccacaaagtactgggaacagtgcctagaatacagtgagcactcaattaatgttatgtataacaataaactaaagagaaaaatagtaaaaataggcaaagtgaagtcaaagaggtagggcaataaaaatgtgtacagagcagcatttcccaaaatgtgctccacagtacactggagaggctggcaatactcttgtattgaatgttattaaaaatgaatacctttgtggtgacatgaatttgggaaattattagtttaactttgtttaaactagtattaacttgtttttgtgtgccagaatttcttagaacttttaatatgttaacacgtattgtatcttccacaggagaaatatgatgtataacattttcaaacttgtttgattatagtatcctttttgtttctctttctttcttttttttttttttttttttgacagagtcttgttgctctgccaccaaggctggaatgcagtgacatgatctaggctcactgcaacctctgccttccaggttcaagcaattctcctgcctcagcctcccaagtggctgcgattacaggcatgcaccagcctgctcagctaattttttgtatttttagtagagacagaatttcaccatgttggccaggttggtcttgaacttctgacctcaggagaataatgaatatgctctaagaaacaatatttatgcttatatgatagatgctttgtttatctttcctttgtttaaaaaattataaatgtaaccttaaggataaagaaaacatagcagcaagatcaactgtaatttaaatctcagaatcaggagaatttgcttggaaagcaatcatcccaactttcttataaaacactgatgttcaggaaaatgcttttggaggaaaatacgtagatatcttccttactttatggactgtactaattctggcttcagtaattgtacatgtaaaatgtttctttgagttttgaatcaaaaaatgaaccatacattttaacatcattttccaatgtaattatcttaatatatagcttaacagaccaatcaactttgttcagtatatatcattgaatcataaagccatattttttcaaagaccatctagttcaaaatttaagctgatgcttagatattgtctctaatatcactgctaattaatcataaatggtgacattaccaacagctgtaaagtagccattccaccttcagacaacagttttgttgttttgttgatttggtttggtcttgagattaactacttctggttgtagcattcacatgttacttccatctctgtttgactttagtagagcactatatagtaactgctcttgctctcatgcatgttatgaataactgctttgccaacagacctgatggcttataaagataaaatgtgagaagcttgtcatctcactgttctgtcctcatcctccatcacacaactttaagctatttacaccagcctgagttttctgcctattgccatttttttcttttttatagccccaataacaaattgagtagaaaacagtttttattcttcccgagggtgttccacgatgaaccatggtaaggagttgggaatgctagtgtgagaaaaatgcatggcacatagtaagcattctatacatgcagattttatattattccaatctctgctcaagaaacatttttattcagcacttctttctgaacagcctatctaaaatcatccctatcactctaatattttaccactcttacctaagcttctttttcttcagagaatgtatcattcactaaatgacattacattgcatattttatgataacttagctcctctatgggaatatttataggtttcatgacagcaaggactttgtccattgtgttcactgttgtatcctcagctcctggaagagtgcctggcctatggtaatgtccagtgaacatttgttgaacgagtgaatgaatgagtgttgaataaataaatggagtgagggaggtcaaatggaaggtatgggacagactcgagacagaggaatagcaggatgcaggtgtgcaagcacagggagtagagaagctgcacagtgagatgagctaggagggagggtctatcaggcaggcgccactgagtcgggctggggaggcagtggcaccagggtggaggatgacctggagatgccattttgctctggtggagggaatagaggttttattaccacaggtgaaaatgagctcatttagacatcaagataatgttcctgacccttttttttctctttattttatcaggttagagtaaaccactgaggaccaaatgatgggtgcccaagtcataaataggttcccttgtgtaatgaagcaaaagcatagcttttctgatcatttattctccatcgtattcattgactgtgcctataatttacttacttataaaaagtaagtttttaaaatgtaaaactttgtttttatcttggctctacggtttgaaaatgtcaaatagaaacttaatgtgtaaatctttttttctctcaccatgcacgtcatataaccagattgtctctagacctcaaaaggcatttctggaaactcacacaactaactgaagctctgatgataaattattgtttttcttcaaaacttaaaacttttatgatttcctttacttttggaaattttattgtttatttttttaaatgcacatagatacctcacggaaattttaaaaatgactttttgaaaatgattgtcttttcctggataaaattccattacgtaacttcttatagaaacaactggtaatttttatactcagttgaaatactaggtgataaatattttattatgcaacacagacagtgagttaaacatgctgattcatgagtgctacataaagtgttagtacatatagaccaaaaacctgaattgtccagattttcaagtgactaacatacaaaatatatgcttaagacaactgctattacttaaataattcagtatttctctggtaagttgaaaggtattacataatcttgtaatgcactgatctatatccatagtctattaactgtactgaaaaagtactgaagtttgggttagctgtaatttttattctacaactttaattttgtttctgtttgttggcaaatcaatatatcatccaaagccaaaaatagaaggaaaattgtgatcaaattatttacactctcacatacatgactgaaaggagtttttgctcctgcctttataaatttatgatcaggagactcacttctggagtataaaaatagcattaataattctttaatgaattgttttccttaaaattaataatcttctttactcaatatcaaatcaaaatttctggaaacatttgaaaacacatttacacaagtctctttctgtctctggagtggctacactagaattaagctaattgtcacacatcatcctgtctctgagataagccaggaatttccaattttagtcaagttggtgatccataaaatagatatcctagtaaaattactatgagctttctacttactttgatattgtgctgataactaaagtgtaattataaaaattgaagtgttgttactgccaaataccacaaagtataagcatcacacttataataatacatattgacaccatcaccttaagaaatatcttctcatttgaatgtacttaaaattcttagatttttatctaggaaaaaaaattggcttctaaagttcgtgaatgttaagttgattaataagataaatagtaaaagaccgagggaatggtatattgtctccatgtattattaaacattgagtcatgtggtcatctcttaaaggattatagaaaaaaaaggtttttatgaaatgcattggtgtaatagccttatttacatataaacatagtgaggagatgtgcccaagtttattctgcattgccatgggggaatttcctctgcaattttccctaactaaattatactttttaattagtcttttagaactgactataggccttattcaaagtggttagatacttgagatttgtaatatggaaattgtggtattgacaaagctttgctaaaataatcacaaggacttagaactaaatactttggaattcattctaaaaacttagtttatgaggttttgttatttttttttaattagcgaaatttgctaaaactgagccacccttataatgtgtctcagattgcttccttggatttacattttatttatttgcaacaaataaaatacagttgcatctttaaaccctttttccatctctatgctattaccttggttcatttctactgctagattgatgtaacatctttcttttctgaaggatagttgagaaactaatgagaatctttccattgaaattcttgctgctacactgaggccttcaattagcctctttactatatggctgcttatggttttgaagtaaggtattcttaatttgatatctttaagcctgaatcaggtgtgcatcatcatgcacgagaattctgtaataacatacaaagaactggaaaactgacagatgttcacagcggaaaatgtataaaatacaacaggcagaaaaagaatatcatcattcctaaacactgcattccaaaatagctaccatctggagacatatctttccaaatcttttcctgtatctgtgcatttgagtgtgtatgttaaaaaaaaaaaaggtataaaacttccctactatacatgcttttttcacttaaaggtattgtgataatttttttcaagacctgaacattttcactcttctgcaatttaggacattaacccatatgtcaaggtcaattgcatgcaattcccaagtgtatttgcattgttaaagacgtagatgatcatagatacagattgtaaccatgaagtggggaaaaggaatttgttgagcaaagagattgttgtctatgtatgtgcccaccattagtgtaactactgaagaattacacacatagcaaaacttcagaggctatattggcaggcatttattttccattttttcacaactaaacactgtgcataaggaacttaagaataaaggcatgctggttaaaaaaaaagatataggattgaattctggctgtattctttactagctatggcatttggcagtgtactgatctcttcatagaagacaaatcacagtggctgcacagatcactattcctccagcagcccagtctgccatcccaccaggtcagcctacgcccagccttgctaatatcttgctaatcttggaggaaaatttcttttcctctttgatccacatagtctgaagttgggataccattctcctacttgacctcactgctctgggcagaatgaacagccaagaggtgaacacctgacctaagcccatgtggggactgcacctcgctgaccactgtctttggaattggcatgtgatctaagccagaacaatcagaacctagtcctacaattgttttcaaactggcaatggcaggggaggtgaaagaatattttcctttccagttgtggagctaaggcatgagcttggacagtgtcctcaaccataaaactgactcaagaagaaacgttttgtaggaagaaatattttatagcagaaaagaagccagcaggaatagtagagacttcagcaagactatcattcattgcaggaagatgatctcattcctcagactccagtgagtcactccacaggcacttagaaaaattacaaatttactaaaattcaactccatcataaccaagcaggcataatagtgatacttgggatccttatgtaaactgaatcagagtgattatgtaatttatcataccaaccggaacacttccgagagtgaagggatccttatgccaggacagaagacgcaaatcagcctgttctgggaaaaccgtgatggatggttacctcttcctgaaaacacaaacaaacacgttttgtgcagtatgcagtcactagttcctcgcccatctcactcatccatgaaaatctctgctctaagatgaactaaccatagaaaaggaattgcaattatcttaaatcaaaaactaaaacctgtacacacatattcctagaaacttcctactagcccagaactgagaataaccaaaatgtccttcaacaagtaaaaagtttaaaaactgtggtgcatccataccatataatattattcagcaatgaaaaggaatgaaccattgatacacatagccacttaaatgaacttcaggaaaataatgctgagtggaaaaagtccatctcaaaaggtctcattctgtatgattccattatataacattatgatgaaggaaagtttcatggttgccaaagactagggattaggggaatggggaatagctgcatgtggctaaaaggggctaacatgaggaagccttgaaataatgaaacagttatatatcttgattgtggtggtaattacataaagttatacatgtgataaatttgtaagatctggacatacactcacaaatgagcacatatgtaactggtgaaatctgtatatgctctatgagatgtactaatatcaatttcaccttttggatttttcttgttttaatatgtaagatatcaacattgggggaggcaggatcaaaagtacctggaactttcctgtatatttccttgcaacttcgtataaatctgtagttatctccaggaaaaatgtttttaaaaactttattaggtttttcaaagcttgctttgttttgttttttgtatgtgtgtgtggcactctgctatgtattttaacagtggatagatatagtctttgtcctacagggactgtttcagaaaaacaataactacaattgcagggaaagtaagttatcgaagcaaatttgaagcacctaggaacatacacaaaatacacaaagacctcaataaaacaccattagctgcaaactcaaatttattatgaagcacgttgtatattggactatattcttaccaggtttatctagaaagttcttgaaaggaccaatcattaaggcattccccttcataattcccacaacattgttaaaggcaacattttaatgactcttcagagaatcagataaaaaaggaaattaccactgtaagaggtaagggcaaaatattaattgataaagtaatattcttccattcttttagtaattattaagtagcatatctggaaatggtataaataagtctgaacaaaatagaaagtataagataagcttacaaggtttgagtaaaacaggagcggagtagaggaaaagaatggatgaagtattaatgtgaagatgaatacatgttcagatatttccaccagtcaatcatcaaacatgtattaaggtaaacatgtaaggaaggcactgtgttcctcattttaagagtacaaaacaaagttattttgctaagaagtctgtaatacaagtgaaaataacaaacatgtaagaagctaaagggcaatatatgagttaatactataatagaagctttgaagtattaacgtattagtttataaatgaatgagaaagagaactgtattgaaataaatgtccttgcattcagataaaggaaaaagctcttgggctggagggagcactgatttcatgaaggaagacaaaaatttaatataagtccaatagagtttaaacagttaagagcaggttaaggaaaacatttcacattggagaaagagaagaacagaagtagaaacacgagaaaatgtaagttatgtttaggaggcttgaataaaacagtggggacagattcaggtcctgaggaggatgagtagttggaaatgaggttgaaaaggtggttttgcccagccatgaacttctattcataataatctattcaataatgctgcaaagggaaacattaaaatgagctttagttcagcagtggtgtgcaggaaaaaaattatcatacctcattttagctttaattgattttataattccaaatttgctgttaaatgcaaatgcttaattctaaatacgtgtgctctgtcttaattagataaaataatcctctgttgcttgggtagttcagtaaattagtccctagacttaaactcccctggatcatgttgtttatgcattaatcggtatgcactcttagagataaatgaaaaataaatggattttttcagagacaagttgtaactgtcagcatactttcaaatttatatcctctgcatgtgactaaaaatttgccatcgtttactgtagtaattacaattcatatatatatgctcccatacttgtagaatttcttctacatgtttgtattttatttaaaactacatgttgctagccaaagctaagtagagaatctaaacctcaccattatgtacataaccatgccaccaactcaacaatgtaggttctatctgcatttgtatataagatatgtcccaaaggaactaatcaatgtaggtaactgaagcagaaattaaatgatttagttcttccaagcctcactgccttattgataatgatggagatgatactgatgatccctaccattgactgagtgactgctgtttattggggacattcctaggaactttatgtacattatctcatcgaatccttatacactcctatatattataatcatttcagtaatgggcaaactgagtttcagggagaaactaaaggagttaggagtgaaaccttggtccatttgaccacagaactctacacacactgtaacataccatactactttgtgtgaaaactatgacacggcttgtatttcccctttattggtctaccacttcttcctcttcctcttactacggaaatatctcgagacacaggtgactgaatcagtccttggttgggactgccttttggacagaaatggggtagggatcactcctggagacagctgattcctgcccatccaaaatcattcttgcggtttcttttttctgtccgtcaatctgtcaggcacatgttcccagaaaaaagtctgtatatcagtggattcctatatattcgtaaacgtcaggcttattcttttgttttttatcttcttcagtgtaatagatttgatgcttctgtactctgtaagataattacacagagctgaatgtaatgttacgtgctgatggggagaactggtgttttaaattcttttaaatctggagcttttatggtcaacgttagaagcaccatggcagacttatgccctggctttagaagcctgtatgagattttgtgacttgctggctttatgagacttttacacctcagattggcctttccctccaagaaagataccaccagacaacaacaattttaacactaatgtcttccttttgattacattagatttgcaaattaaacagattaatagtagtgttctgtgttcctctcagctcttctgtttaatactcttatctgacaaagtgtaaatagaagacataattaattactcattacttgcatgtcaagttgcataaaaaattacatccccaggaggcctattattacatatctgactgttcagtgaaattagttttgcaaagaaaaagcataccttaaggtaagggttttgtttgtttttcttttctttttatttaatttattagagtatctgcaaaaaattgtggaagaacaacattaactcttaatacacaattaaagagattaattcatttgcccaaggatatgttatttttccttttttattttttagtttgtccatgagatattaaactttgcatttgaaagttataagctaatgatgcttctacaaaaggaagaccccagaatatgcctattgtctctttagtatatatcccacagagaaagttattagttaagcaggctatgtcataccccctcctctgtaaattgtctcaaccttgagctgggaagtgtactgccatgactgaaaaaaatagaataattttccagccatttcttgtcttatctgtctagagttgatctgaatgaaatgaggtctctgcttcaactggagagctcagcatttcatatttagctctcaatctgtttcatgataatttttgaaggaacagactgcttatgacaaaatgtgctgtactattattaaaggcatactgcctttatagagttccatcacttgaaacaaagtgctggctgggaagaattcttgaatgtgcatatcttctgaggttttttaacagctattaaataaaatatagtatgtgcctcaggtaagagaaaaccaagtacctgattaaaaacaaaacaaaacaaaaaggtcgtagcattgtcaatagagcaaagcagcataaagcaaagattacctgcctgcaatcacttagtcacttcacctctctgtaaaaatgacaatcataatcacctctacctcgcaggattactgtgaggtctaaatgagctaatctgtgaaagcactttgtaaactgtaaagcacaatttaaatacatattatcttattaaaaatgtctgcatcacctgtttcattgactctgggagagagatgttttcttttccacatttatgtgtatttgtgcatgtgtgtagtgtgtttcgtggaagcctttaattaacacggtagtactttctttttctttttataaactaaagtttgccatacccaagtgcactttctgtcacctgaagtcacagcttaattatgtgtctggaatgacttaatatataaaagtcataaaaatttctgtctaatggcaactatttttatgttagccctgtcttttatatactgaccagatcattctcattaaaaattgttgtttatctaatttcatacccataccacccagcattctatttgtacagtgttttatgtctatgatcaccaatcatctttcatatgttatatttgagcataatttattctttctttctatgaacatttatagagcatcaattgtgtgccaaatactgtgctaatcattcagtgtctccttggatttcacttatctgtaggtaaaagtgattacatatttatagtaataactccaattacagtgcagttggctcaaccagtacacacccaatatcagcctttttcctatgaagagccctcacaggtgttgctcagtgcccagtggggctttgctgtggaaccctagttctctgcccttccagcctcgaagttttcctgttagacatctgccctgctcgaccaggtgctaccactgccaatcccagcaccttccttgatgtacccaaaatcttcccatgccttgaaaactaagcctttcttagtatgtcaagctgttgctttggggttttctttgttagtttggttttcccattgcagtttgtcagctgtgggccgataggtttctggaatttcagtgtcaccaattattcaggtatgtgtacctattcaggtatgtgtaccagaataattgtgtgtgaaggtgtgtgaagtccatttaggcacaagctgggatctccactcccgaccccatcacattaaaaatagcaaaaattacttatctaattttatcttcctctcatttgccttgtccatcttctagttgagttgaataaactagtggacagtgaaataatcaaatgcaggatagcatacaggaagatgaaaaacataaatataatctaattttttaaagcctgtgttaaatttcttctgcttgtaaacgttttgaaatcttaattgaatatgaaaatagatacaaggtaaaaagtttatttttgtttgatactgtgctccatgtatttatttctaatttccacagtggatggaatattagaaattattgaaagtcctaattatctcaaacatttgcattttacgttaaatgtcctaaataagcaaccatttaatatgaatttaaaattaaaatttaaaggctggacgcggtggtccatgtctataatctcagcattttgggaggccaaggcgggaggatcacttaagtccaggaattccagaatagtttgggcagtatggcgagacccctatctctacaaaaaatttcaaaattacctgggcatggtggctcgcacctgtagttccagctacttcagaggctgagatgggagaatcgcttgagcacaggaagtcggggttgcagtgaacatgattgtgccagtgcactccagacaagatgaaacagcaagaccctgtctcaaaaataaatatatatatattttttgagacagagtctggagtctcgctctgtcgcccaggctggagtgcagtggcgccatctccgcttactggaagctccgcctcccgggttcgcgccattctcctgcctcagaccagaggcgcctgccaccacgcccagctaattttttgtattttttagtagagacggggtttcactgtgtgagccaggatggtctcgatctcctgacctcgtgatccgcccgcctcggcctcccaaagtgctgggattacaggcgtgagccaccgcgcccggccataaataaacaatctttttaagaaaagtttcattctttatagaaacatatcctacgttgaacgagagttttaatgtgagtctacataatcattgtcaggttctaactaaaaagaaggcaaatataaaaaccggctttgtcacttgaagaacacaagaaataataatgagaactatgcaccatttcacaattctcacacttgaacattgttaatgttgaagccccaggattatggaaacactggaaatatgccacactgtgatcacattcatttttagaattaatagtaggtatcatccaaatggttctaaaatacattttttaagtgtgaaatgtctttcacaaatatggccatgacttttcagagcactcttttgcaaataaataattctggatagccaaattctactagacctccctatacagaaatctcataaaactcagataaatgcaaataagtcaatgaaaagaatagctctctatcttcctcctaactcagccacttaagactaatattgcctctattaaagagatgaaagcagatgtggtatacattattgatattgctccacattgaaagttaaaacttttatatatgttctctcagattatataaaactcatataaaatttacttaatgaagttttcaaaatagtgtatgggaaaaagggtaagtttgtgatttcatggctgttttcatatgctgatctgaattcaatgtcgtctctctcttttcacaaaccatctgggagattgacaagttgcatctcaccagatggcctaccataccaacctcacacttccatggcaccatccctccatgataaatcctgaaatgctttaatacaatgttcctgctcgggaagaactccacagctcatgccttacgaaccagttcatcgtcacccacttcatttcccaaggttgaaatgggatatgatttccactgggtgctaaattattctatggctcagaggaattaagtgatcccagctgaatacaccaccaagctcctatcatcctatctttctacaatctcttttcttattctctgtttcccttactactccctggcctattcttttataacttacactttacagagagattccattcttttttcctctccttttccatatacataaatcactggaatgtatactttaaagtgtcagaaagcaatgacagttttgagctgtggttcatgtcttcctgaacctagcatgcagatagttgatactatacaatacaaaactgaattgtctgtgtcaattattttatagtatcactacatatttaaaagatactataaagacacatgcacacgtgtgtttattgtggcactgctcacaacagcaaagacttggaaccaacctaaatgcccatcaatgatagactggatgaagaaaatgtggcacatatgcaccatggtatactatgcagccataaaaaaggatgaattcatgtcctttgcagggacatggatgaagctggaaaccatcattctcaacaaactgacacaagaacagaaaaccaaacaccacatgtttgcgttcataagtgggagtggaacaatgagaacatatggacacaaggagggaaacatcacacaccggggcctgtcggggggtggggggttagcattaggagaaatacctaatgttgatgattggttgatggatgcagcaaaccaccatggcacgtttatacctatgtaacaaacctgcatgttctgcacatgtatcccagaacttaaagtataataataataataaaagatactgtctgggaagagattcttaagaccactcattcttccttttgcctttacaaatgtcagagaggcactaaagaacaaactgtgaaggaaaaagacctgaaaaaatatcttttttcccctagcttacagatcaaatctgacctcaatatcttcccccactccctcccctacttttcccctctgagcctctctcataagttttataaattcttccagtcatttagtgttcaagaagagagtccaaatcagaaactttgcttaatatgataggtctcatttctctggtgccttgatcatctttctttaaatagagtgaattttagcttccaagttattttttcttctctttcttgacttttagactttactgtgtctgtattctctgacaaacatataaactgcttatatcttcaccctcatgttttgcatatcaaatccaactatctgctaaatttttcttttcatttagcagtaactgactaccataaatatactatcactgtaagaacaaaccatgtcatagagaagtttgcctccaggaactttatttcaaatctttttacttaagttttcaaaatgctactttatatgttattttatttctcccattgcatccccaggttgggtcagatgacagtatacctgcatcatctttatatgtggatatcagtttccatttcctattctcccacatgcagagctgcaagaagttgtctgcagcttgttgggcacataaagatctttatggaacaggctctgcacaatccaacataatattgacctcagagaagtttggtgctttccttgggtgtgactttgtcgactagaagattagccagtgtttctcaagaataccgaatggtctatttggtgtagataaaaagagaaattgtgatgattaatgaaagaggaatttttgatacggaaagaataagattagttctgtcatgaggatagggagaccaacagctaactcagttagttaaaggataatggaatagagtaacatgaaaatctgtcatcttacttccctgcttaaaacatacaaatagattttcatggttcttcagataatgcccacacttcttcaggggtttaaagtctttcatgatctgatttattatcactttgttagtgtcatctcttgtcaattcctcacctttttatgctgtaatctttctgaatttttctctgttcctcacacttgatactcattctcaccttcctctaatcctttgcatataccattctctctgcctggaaaattcctaactctacactctccccttaacccaacaagtggctcctcatcctccaggtctcagctaagatgatactccattcacaaatgcattcctgacctcctctcctttaaaaatgggaggagtactcagttttttcctcctcctcagaaaccttccatactccatccttaattggctatctggaaaagtcctgtttatttatcaagacacaacttaaaacagttttctattctttgaaaccatcccagcctcactcaagtgtagttgattcttttccttcttaatacatcactataacttgaagatatgtctattattaattaaattacactgctatgacaagatttccctgtatatttatattcccaaccaggcaataaatatgatctccttaaagaaagagactgtcttatattcactattatcattttacccccaaatatactctttcctcacctgcttatcttacagatgtaattaatttttagttacctatctgttactctgtaagccttctaagggagggaccatgtttaattcaccactctttacctaccacgtttcacaaaccttggcacatacagacactcagatagttttagaatgaatgtatgagcttgtatttgtatacaaaagataaatttttctgcaagtattaacaaaaaaggactgaaccagagactcttagtagttttctgtagcctttactaatgttgataatatatgataaattggaggtcatagaaaattcatctggtctatttagttacaattcatttgcatggccccatgcagggcagagatctagaaaaaataacacttatgaaaagttatgacaaataaatcagatgagaataccagattatacaatttacctatggccctaaacatagtctaatatacttaaaagacagacatacttaatatcatctgcatacattttttttcaacaagcattatttatagatcatctaaaatatgctaggctctgctgataggaaaaataatgcatcccaaaagatgaccataccctaaccctaaccgtaactgtggaagctgtaaatgtgttttcttatatgacaaaagagactttgctgatcggattaagattaaggaccttacaacagcaagattattctggaatttctagctgggctctccaatcacctagttccttaaaactagaagaggaaggtaaaagactaggtcagggaaacggccacagagagactcaccctaccattgctggcttggaagatgcaggagaaagggcataagccaaggtatgcaggcagtggaaggtgataagccaaggtatgcaggcagtctctagaatctgggaacagtcctcaggtgactaccagcaaggaaatggcgacctcaatccttgtaacaggaagaaactaaattctgccaacaacagtgaaggagttaaaaaaaaaaattataggccgggcgcggtggctgacgcctgtaatcccagcactttgggaggccgaggcgggcggatcacgaggtcaggagatcgagaccatcctggctaacacagtgaaaccccgtctctactaaaaacacagtgaaaccccgtctctactaaaaatacaaaaaaattaaccgggcgtggtggcgggcgcccgtagtcccagatactcgggaggctgacgcaggagaatgacgtgaaccccggggggcggagcctgccgtgagccgagctcgcgccactgcattccaccctgggcgacagcgagactccgtctcaaaaaaaaaaaaaaattatagagcccctagaaaggaacacaactcttcttctgacaccttgattttagcccagtgagacccatgccagacttctgacctatagaattgtaggataatacatctgtttcaagtcattatatttgtataaatttgttggagcagcagtagaaaactaatgcagcactgggctaaatgcttgggagagaacaataaagagctattcttaattaatgtctcttttttatggcatttttaaagaccatagaatagtctgacctgcaaaacagatttatggaacaagtaataccgatacagtataataaaacttatagtagatgtatataagttttatacttcaagaaatagtgatggaattaaggaaggtgttaaatctatttggagtgggatcagggaaaatttcagagaacaaaccattttaagatgggtccttaagtaataaatactagttttccaattggctagatgggggtacgatttagtaccatgttaagctaagaaggagtgcaattggagatggatgagtgatagaagaatgagtgacatgaggacttgtttgtcccacaaaatgtatttggatgtataatatggaataatttgcatctagaaagtttgctccagctgcaaatggggaatggaagaggggcaacactgtatgcagagactactaccataggctgagtaagaaaggatgaggtctctgttttataatagcccccatttattggaacttggctatgtgtcagcaactataacaacactttacatatataattccatttagtctctgttagttagctctgcaaagcagatgccattccatctcacaaagaaaccaaagtttacacaaatgtgcccttaaaaaagaaataccccacaaaaagctaacaaaagtaggattcaaacccagttgttaatcacattaaagcctgtgctttaattcactctaccatggcaggaacagggaatcaatataagaagacagaaagagagagatttaataggtaaaattaactaagcttattattgattacacgtaggacaagggaaagagaggaattgtagcttactgatagtttttggatttgagttctaggggaaaggagttccagctaagatagggaccaaagtagaagacactttctgagtcaggaataaaagttaagcttcggatgaatttaaggtgtgtattggatagccaggtagagatgcccagaagccagtctggaatttagaattgggacatggactgaagagaaggatttgaaaatcatctacctgtaggtaactttcatggtctggaacccttcatatataaatgttggagaaatctcctgtttctaatgaatagtgaaagaatctatccttatctgtgctctgaaagaaactttcatctgagactccctgaaaagatggctcagcctaacaccaacgctgactaccagactgggggtgctggcaaaatggcaaactgacagtgccaagggctttgtctgtgtcctgcttgatgaggtcagaaccttgttcccgtggaagacctactatgtcatacagctctgctgcattaacagccagtctgaaagtaaatactttgctttagacactgtttttaactgcttaatgagcatactgacttcccaccctaccccccaattagctgcatatcaatcagtcaattagcagatagacagctcagccaaggaacagtgaaggctggtgttgcaactgattgttaaatctgtcttgaatttgctattggaaaatgagagaagtttagggcaaatactgctccctgtacccctgactgaaatcttctagacaaaataattgctatcaaatattctgatacaggaattcttgaaactgcctggttactttactagaaagggaagcagccactaactgcaaaagactacctctgttgtaccagatgcacaagaagagattttcaccattgcagagctatttatacacagccaacttctgtcctcagttcacatatacacacaactcccattgatatcagtggaagctgcggacatgtggctgagaacagaatttggcccactgagctgcaaggcttggcattcttttgctcactatgacaacttcagaactggatctcttagcacatgtgcttttagaagaagagttcttgatttattttcttttttttccctcccctctttatcttggccttgaaaaacaaaatggaaacttgagaaactactggcagcaatgggtttttcttgcatagaatcaactgtatggcggacttggagaaacagagaccatacaagtttttggattcaaaaacttgacaaaatagttttctgtaagtgtgctgccgttcccaggatgccgactaacagcttggcttcacagtcgtccttgaaataaaagcaaaagatgccatgaaacaacttttacacacgtaaaattattaagtccaatatttaatttacagatgacatattccagagaatatttgaaacctgtcattaatatgtacttttattcttcttataggaattgctctttctctagtttaagtgattttagtggggctgtcagcaagactcctgcctccctgtaagtgtacatgtcaggctaggcaatcagtgtatccagtcctcttgaaaacaaaaggcctattaaccaaggagagacaaccagcatatgatatttcaaagattatatggaacagggaaacagactctccttccgaggtcaggagattaaaggatacaaagtcttttagctttgggggccagttttgtaccacttagagaaaaactgcaggtaatgaagccaacagggaggaaagtaaagaaggtagaggagaaaacatttttataatatttaaatccctggatctagccatgccttactgaattttcccactatgaacaaaaaattaatccctttattcttaaactggttggagttgaatctctaataactggtaacctatagggatttaacaaaaaaacattgctccttcattcactctagagattttctctgccaaaatgtatttttttattgcgtgcaaacactcagatttcaccatctttgtatatactgaaactttcctaaataaataacctcaggaaaaacatgtgatttgcaataactgtggatgctcttcacaccaagaagataggcaggaagattatactagacaatgcaaacacataatgtctccatgtctctgctctgttgggaaagaggaagccagtggaggaccctctttgtggatgcactttgaggaagcacctcattatcttgactcttggctgttgcccagtgtggtgccctgatggagtctgcgcccagcatgtagctctggtaatggatccagtgacaggcagactgtgttacaaggtgcattacacttgaccagccatcattacatcggttctgcccaaattatttgattgacatttttagagaaagtcaggaactgttcataattggtagccaggaaggcactattttcaaataagtgaataccaagaatgaaagtgtaaaggaagagacttaaagaaatgggaaggttttcagccaggcgtggtggctcaagcctgtaaccccagtactttgggaggccaaggtgggcggatcacgaggtcaggagatctagaccatcttggctaacacggtgaaaccccatctctactaaaaaatacaaagaattagccgggtgtggtggcaggcgcctgtagtcccagctactcaggaggctgaggcaggagaatggtgtgaactcgggaggcgagcttgcagtgagccgggatcgcaccactgcactccagcctgggcgacagagcaagactctgtctcaaaaaaaaaaaaaaaaaaagaaagaaagaaagaaatgggaaagttctagggaaatgggtcttctgccattgtgaaatttggatttcacaatttaggatgtgtgggccatcctaaaattaggagaatgtgattcagccttgatacacacgaattggaagaatagcttacataaacagcctttagttacatctatttggcatagcaatgaatctatgcaaaaccttaacagtttattgtacagtacattcccatcaattacccagaaaatacatgtcttatatgtcaatatatcatgcagtagattcccattaatcatccggaaaatatgtcttaggaataagttatctactgcctgaggaatttaatttaattgttgaagaaattgccttcagcagggactgatttcttgcatcattaccagtgagtgtttcctcacatgtaataactgattttccagacattcaccttataactcccatttatgtgcaggttacaatatccattagacatagaagtcccccttaccacacatgaaaacacatacacccacctacccactcatctaccccaccctacccaccacacacacgtaagaggacttcaaaaagttcaaggacaaatggaattaaagataaaaattaaaaagatgaacttgtttttcaacatatcatcaagttcaagacacttattataaattatgataccagccatttagtctgtccctaaagaactgaggctcctaagaatttaaccatgttgatgcagtttttttttttacattattaagtgaggaacaatggataccctttacagatttttttaacattcagaaacaaaaagaagtcagaatgagccaaatcaggacgataagttggatgtctaacgaattcccactgatattctcacaatattgcccttgtttgatgagaggcatgagcagaagcattgttgtggtggagaagcattgtcatgatgaagctttcctgggcatttttcctcaaaggctttggttaactctcaaaacactcataataggcagatgctattgttctttggctatctggtatgtcaacaagcaacatgctctgagcattccaaaaaattgttgccatgaccattgcctttgactagtccacttttgctttgattgtaccatttccacctcttggtagccattactttgattctgctttgttttcaggatcatactagtaaagccatgtttcatctccggttacaattcttcaaaggaatgcttcagggtcttcatcccactcgtttccataaaagctatgctcttgtctgcagctgatctgggctcactggttttggcatccatcaagtggaaagtttgttcaatttttttcagtcagagctgtgtaagctgaacaaactaagatgtctatggtgttggctattgtttgtgctgttaactgttggtcctcctcaaatagggcactaaatttttttttaaaaaagggcattaacaaggttaaatttttctacacaaattgatgtagatggtctgccacaatgggctgcatcttaaacattgtctcattccttcttaaaatgagtcatccatttgtaaactgatttctttgtggcattgtccccataaactttttataaagcatcagtgatttcaccgttcttccactgaagcttcaccataaatgtgatgtttgttcttgccttaattttagcagaattcatgttgctttcacagggggtcttttcaaatggatgccttatctttcttagtgcttcaaactagattgtatttatacacattataataagttagtaagagtttattttggtgcaaaaagtttttgaaatccatctatagttttctcataaatgcattttccatgaacttttcaaagacctcttttccatcataaatctaaaaaatgttaagatttaagtagcttcactcatctaagagaatcactaagcatttatttgactgcttgtttttcttctactttaaggtgtgcatttgtttcttactgcatgtaataaaaggagccatataaaaaaggtttgttatatggtataataagcaccgtatatacatggtctttctggatactcacaacagccttgtgagacaaagacaaccccgttttacaaatgacaaaaacaaggcttagggctatgaaataaccaagcaaatgagtttgattccaaagctcattctaataaccactaagtaaatgtcagtgcactgttgtatatttttaccgtattttataaaaggtccctaaagacccaaatcctctgtgcatttagttacaagcaccattctgcatttccccccaatacattttcccctggtttatacctatcttctttgttctattatttttgaaattttgagtagtaaaggaatttgggagagggaggatgaagagagagagaaaggaagacagaatcacaccgattaagatgaatttagaaagtaagaccactacggctcacattggtggcatttccctatgtgtctttgcaatgctcttatctgacacaggtctcttaaaggttgggttgaatatctgttcctcagttattgctcttttactccccaaaatcttcccctacaaaggactaaaaatagtgatcagaaatgacctttccctccttagtcccaggtttgtttgggatttcatgtaataaactagagcatgggtgtcctcttccactgattgccatgttcatttcatggccttagtcaggtgccttggctgcaaattttccctctctacactgaaaaacccagttttgctgggcaattttagttcccactatgaagaaaacccttccagcatgtaaatgcaatgcttggtgaggcctttcctgaaaagcagtgttggccttcacacacaagatgagacatgtggagattaactttaatatctaatctattgcagaggtgaaactaaattctatttctttctcctcatctgaaatgaaaaggaaatgcttgaaattttgccccccaaaatagagcactttaatcaaaccattttaatgtgatattcctgtgtcttcattaagtttccagacagttttaatgtttattgaactaaattgatagggttaaacatctttgtaagtataaactaaagtttttatggctatttctattattgtgtaaaagaaaaataacaaaaaagtatctattcgtttgaggaggtagctggtatttgctagcaaaggagaacagccatataattaactgtgtcaaaatgttttctttgttcacagttaatctaactgcagctgctaggaggcagaatgcataaatatgactgtgtacttttaattacagaaaatgacaggcgtaagttgtgactggagtgttgcctgagattgttgtgggcaaaaatgttgctcagagactcattgaattaataagtagccttttattttttggtgtccaaattgtatagatgttactagcaactaaaataaaattaaatttcagaattttaatcagccaaagaaaatttaaatataatcctgcaacatatttagagaaatcatggcacataataaccatttgatattgaacattatatacaataatacttcatacatgtgatttttgtcttggagcaagaaatgctctacataagtgaattttctagagatacctttaagaattaaattatttctcccaattttcctctccattctgtgcaaagaagtcactcccaattctgatttttttccctagatgctctaataataatgaagacaaaatatctcatatttgctgatttttctgttttgataacacatagtaatgcctataaatggaggggtgggtagctctgagtcctggggttcattcccctctaggtgttgatacttatgacatagtatgaaagagaaatggagcagcacttcattatttgggacattgttctcttcttcttccccttttctcttctacctttaatggctgaatagtatagcagaatgttcattgggctttccatcaaacatattttatattcattgtaactctgagcagagaacttaacctttctgaaaatcagttcatttctttatatggatgaaataggatcatcaatgtttaaattttaaatatagtgattgctcagaaatgttattccttttctttttatttttctcctctataactattttttaatcacctttttattatacatcttttctcctttctgtgctatggtagacaggtagggggtgtggtattggctagggaggcttaaggggtcacggtcaatgctgtagataattgctgttttcagctgccttgttgccttcattctattgtctatccctgcacgcagccactgtgggggtggctgtcaccttggtgacagcagttttgtgccatgcatgtggtgtgaacactggcttagagcagggtataaacaggtcctgctgcttcaagtaattcggtataagcagacagactattgcctttgttctcttagcagctctgctgctgaaatacactaataatagaacatgttagttgaaattatgcctctccatctctaattactgcatgccaaagtattctgactgctactgtcatttcccagcaactgatggctgcaggtgattgtttcagattgtgctcaagggacttcttccactcattctactcattctccctttgccccactacgtcatgtgttcaataacttgactgattcatttcagtatgctgaatggtttgaatgaaatagaaatgaactttaagaaaatattttcaaatcagcagatgttcattgtgggttttctctgtgtaaaggaaagtggaacagtcatagaaattgtttagttatatccagaatctacaatgaactcaaacaaatttacaagaaaaaaacaaacaaccccatcaaaaagtgggcaaaggacatgaacagacacttctcaaaagaagacatttatgcagccaaaaaacacatgaaaaaatgctcaccatcactggccatcagagaaatgcaaatcaaaaccacagtgagataccatctcacaccacttagaatggcaatcattaaaaagtcaggaaacaacaggtgctggagaggatgtggagaaataggaacacttttacactgttggtgggactgtaaactagttcaaccattgtggaagtcagtgtggtgattcctcagggatctagaactagaaataccatttgacccagccatcccattactgggtatatacccaaaggactataaatcatgctgctataaagacacatgcacacgtatgtttattgcgtcactattcacaatagcaaagacttggaaccaacccaaatgtccaacaatgatagactggattaagaaaatgtggcacatatacaccatggaatactatgctggcataaaaaatgatgagttcatttcctttgtagggacatggatgaaattggaaatcatcattctcagtaaactatcgcaaggacaaaaaaccaaacactctcatgttctcataggtgggaattgaccaatgagaacacatggacacaggaaggagaacatcacactctggggcctgtcatggggtggggggaggggggagggatagcattaggagatatacctaatgctaaatgacgagttaatgggtgcagcacaccagcatggcacatgtatacatatgtaactaacctgcacattgtgcacatgtaccctaaaacttaaagtatgataataataataaaaaagatgatctatgcattcctgagcctaattttccggattttgatgaagacaactattcaattccatccctactcctacctaactcccccacgtctctatgcatttcaggcagaccttcaaccacgacctgatattcttcctgctgcagacagccagctctgttcagtcaggctttggatcctggagactctctaatctagtttctaagttttacagatgaagaaattctgtgttacatgaagtgtccaagatctcacagtagcttaagcaaagatagaagacaaacccagcattcccaactgttgatattgtatgctctgtgcctcacttcattgtatgttttacctgttatttaatgtaacagatgttgctgataaaatgtgaacagaagttgtcagtggcaggtacaaatcccaggccaacatcgaaagtttgtcactgtcagaacttctgttcagttttagttacatctgctaaggattctaagcacagtgtacatgaaccttccaaaagatccttggcatttttacatcacttttgtttcctcctgctttttatattttatggaatgagtccaaaatgatcaaggcatgtacagtttacataattgtgcactcaaacttgaattttacatgcatccagaatttggtctaattctgtaaaataaaacctcagttggaactgggctatgctgaaaagcaagtttgatataagtgacattcaagatcaccttgtattttccagatgatcagacctgctgtttctaaaagagtacctcactttgtagaccactaaatgcaaattgtattttaaactatagatttgggggaggaggggtaattaagagttatagtaatattgattcttacccatgtatgagtacagatgatatccccatttattcagacattgttttatacctttcattattgttttattgattttaatgcccttattagattcattttcagatattataaaggtttgtttactcttgtgcattggtctacttttctttctctttccttttttttttttttttttttgagatggagtctcactctgtcggcagggctggagtgcagtggcgtgatctcctgggatcaagtgattctcctaccttggcctcccaagtagctggaactacaggcacccaccaccacgcctagctaattttatttatttatttatttagtatttttagtagagatggagtttcaccatattggccaggctggtcttgaacaaactcttgtgtgcggatcaagtgatccacctgcctgggcctcccaaagtgctggaattacaggcaagagccaccgcaccaggccattggatctatttttctgtcatgtttttcaagtttgtttttgttgacttactaaagaaaaattggttttttaatgttaattatgtgttcagcatctctctaggactttcttctcagttcatgtagtttgtctttctatctttctaatcttatcttgaacagcccactcagctttgttccaacaacagggaccttcagatagttcctaaaattccccaagcattttcctcacccagagcctttgcttttcctatgtctcaagtgttcttcagcccaagtggttagctctattttctttatctttcaagccaccatttaaaaatcaacttatcgcagagattattcctaattataccatcaaatgtgggcccttccctctattgtgcttttcaaattccccagcatcacgtttttacccttcttaaaatgtatcgcaagctggaattgttttacttacttgcatttttacattaaaatatgagtttcatcaggaaaggagcttatcagtgtggctcactattatcttcttagcacctaaagctgtgtctgacaaattgtaggtgttcagaaaatataagaacacaagaagagtgacctgagactaatgatctaacatctctgattataagtagaaaatacattttcaaagcatatagtgatacactctgtctccgctgtaaaagaataaaaataaaatataatcataatgaatatccatgacaataaaacatagtgaaattttctggtctaagtcctgtccccaagtgccatgcaggaacaacaacaaaaagccaagaataatgcatagggactcagcacccaagtacggtttgagccacctgaatttaaacagtctgtgattgatttagtatctctctttctctctctctctctatatatatatgtgtgtgtgtatatatatacatatagagatactaaatcaaatatacaaattttctcttatatttatatgtgtttaaacatatacctatatgtttataagttaaaacacacacactatgtgtgtgtatatgtgtgtatatatacgtgtgtatatatgtgtgtatatgtgtgtatatatacgtgtgtatatatgtgtgtgtatatatatacgtgtgtatatatgtgtgtgtatatatgtgtgtatatacacacatacacatgtgtatatacacacacatatatacacacatgtatatacacacacatatatacacacgtgtatatacacacacatatatacacacgtatatatacacacacatagtgtgtgtgtgttttaacttataaacatataggtatatgtttaaacatatacaaatataagagaaaatttgtatatattgaaacatataccagtataagagaaattatgataaatatttaataaatagctcaagaatcacttgctgcagaaattcagaacatgggtcgggcgtggtggctcacgtctgtaatcccagcactttgggaggccaaggcaggcagatcacgaggttaggagatcaagaccagcctggccagcatggtgaaaacccatctttactaaaaatacaacaaaaattagcctggcgtagtggctcatgcctgtaatctcaactactcgggaagctgagacaggagaatcgcttgaacctgggaggcgaaggttgcagtgagccgagatttcactactgcactccagcctgggcgacagagtgagactcagtctcaaaaaaaaaaaaaaaaaaaagaaagaaaaagaaaaaacaaagaaattcagaacatgtatccaacacctagtgtatcaatagaagaatagggcttatttgaccaagggtcattaacagtgttctgttaatgaaccttgaattggccacagaaaacaatatcctgatctgtcaaataaatgttaccaagtgcttactacattcagcagtgcgtttagtttgcggaagagcagaatgactaaatgaatgaatgaattttaaaattgagttagttatgtggacgtttggcaaatgtacaaaaagaatcagcaaagttttattacaatgcaaatgttatgctgcattttaatttctatttagcctctaatatgcaacattaaatcaaactattgtgtacaagaaccttaaagttcatttaatgtgattttaattcatgttataaattaaattatttgcaatggaaatggagaaatgtcttatatcttagtttagacttgtcagctttccaggctaattttgtgcacagtaatactaactgtagacagacactgtacatgaactacagtgtccaaatcatagatcggacctacaataaatttctgtgtggaggagaataaattctcctccttctctccattctcatatcaaactcctccggtattgcattgctggttagcacaaactaacccataaacagcatttaaggggatgttgccattgctgaagcacatactgctattgaatcccattcttcaagcttctcatgcatcactgaaagtcattcaggactctggattcaccaggaactataaaagccaccagcaactactgagaaggcaatgcaattgaagtgtaactctggttggaaaataagtagggaattgggtgttgagtccctgcgtgttattcctggccaaatacatcagagctacatgtcaggttttgtccaaaagtgttgtatttgctttgattttcagaagttcaatataattccattattacaagttcatctatttcttaatgttttaaatacattttatctaagtattgttttgtattggatttactctgaatatgtcaggtctttatagagaaaacagtaaataggaaatatgatacaatatttacagaaaatattctccagttaatgtatcttattattatatgctcttccttatatggtagagtttatgaagttattgagttcattagaaagtgaattaagaacatgaaataggtccagtaaaatatgaacccacacatcaaaaaaaaagatctaatctccaagtggcttgaagtgtagtgtaaatccagtaaagctccaaaataaataaaataaaataaaacgatattatagtatgcatattcaaatgtattaataaaattgtgtgaaacctttttttaaagaaatgtaaatctaagttaagtgttcttgctgttacagattaatagatccacaactttctaatttcaaatttgaaaagctaaacttgtgcaccaaaatattttcagctgaaatatttttaaacattatattttttctattattacttgagctttttaaacttagtaattcaaactaatcttggaacacttgcaaaatgtgatggaaatgaagaagaaataagctgtaaattcaagatggctgaagtttaatttctgtgccgaccttgggtatgtctagggaggaaaattggcactctcttaacaaaacaaaccagagcttagtttctacatagaacaaggtttgaaatgaatatggaatgaaggtaaatatttagaagattaattctttgagcttcctcaataccttagttttgcaagactttgaaaccatcttctccagggacaaaagaaagtaattacctctcctccacatgacgtttaatcatgctctatttttcgaagaacagctgtgcaacactggctgggctacaaattaaacatacctccttcaacttgcttagatttaaaagataatgaatatgttgggtgacagaatctgaattcaaaaagactttaataggccagagctataagctgaaaacaagatgaaagtaatcaaggataaatgtaaggtcctatacttgagtccaagaaaccaagtgagtaaatacagggtggggaagataggacttaatggcaacagactgaattaagcaccagagaatttagaagctatatttgataagaagctaaatatgagttggtggtttcatctaactaaaaaaaaaaatagaatgtggcacatggtacataagtaaaagcattcatcattgaagacctaacctagtttgatacaacataatatgaattcgagggacttacagctctttgcaaaaaaacgctatcactgttattttaatatttgttcaagcagagatcaaaggatctacgctgacataatcttccttttactagttgtactaaaactccaacagtttctgttattatagaatttgtaaaagcttagatactagctggcatcagaatattatgtatattaaaaattagcatatataccacacatgaataagtgaaacaagatgtagcttaatgaaattatgttgtggaactatccatttaacttatgtcacatttgttaaatctagattactttcataattctgacaaagattaacaactgaccattgtgtaatagagaaagaaaataggacctatgtaaaaatcacagagggtctaggaatatgatgtataaaatattttgaggcttcagtctaggaatatgatgtacgagacattttgaggcttcagttcaaagcataaagagtgaaacatgatacatttaccagaaaataaactaaacttctaaacacatgtaaaggagagaggtcattattatctttgtgaatattcattattacagaattggtaaatttcccaggttttcttggcttctctctctacaaataaatcactgtagtaaaaactctcacaggactgtcaggtgggttttctggaaatatttactgtaattgatttttgtggtttcctaaatgctgtaatccaaaacctcatttatcaactttctgtctgctttattgtaattgcagagttttctattcctatatcatgacaggtcagagcagcgctgtgacaagcagcctctgtattagtaaagatgtgcattccacacaccagcccagcaatccagattattgactgtaattaaactcacaggggagttaaacttgtttgacaagaaagggggtgggatgatttgcaggatttaagtcatagcaacagtgacacatgcctgccccaaaactttctctgaattttgcagggcctgtacacatttagaaaagatcaaataattttgttctgcaagagagtagtacatatttataaagcactgaatcccggaatcactggtcccattaattgaacaacacaagcatgcttcttgaagaaattcatataccaaattttgttattctaatatcagttcattacagtcagacttctggcctgggtccagaaacaatgccatttttaatgggttgattgctaaatctcttgctttctttagtttgactcattctttatcgtttcttcttctgattttgactcatttttcttttcacaattaggctttgtcccccttctgcatcacttctccagctttgaccatgttcttctaatttttgccaagaatgcggaatctaattttgatgacactgattttgctatgctggacatatcccctgaccattcagtggaggtccttaggaaccctacattctgggtgtctggatctcttcccacttcttccacctaccttcctgcctctttctcccatatttggccagtccacatgatcgtccaatgtatgtaagtgagactcaaacaaaagcatagaaaactttgttttcaaaaagtaaaaaccattcactcttttgaatattactgtttgaaatgtgtttaggtcctttgggggaatggctatatatgtttatatatatatatatctccacagtagtagcaaagaaaatcaataaagggtatattttatgactcccttttattacaggataagaccaagaaacattagaatcatttaaacctacaacacagagattgaaatacttgttttatgtaggcccagtctctattgtctgaatttttcattagctatagaaactttactggatattggatatggatatagataatcctctctggatatataaaacatctttttatttatctgacataatgtatttaaaaactagttcttctttcttcattctgtctacaaggaaaatccttttcactccccattagttttcttgcaagttcatgcttgtgataaaagaaaggcagaatcagagtctaaagatgggtcagtgaacacccatccctgcactaaagggctatgaagggcagtgcttgctgttattgggtaggcaatataaaaaatatgtaaggaataatattaattctgaatcctggcccattagagattggagcaatcattgctagcaaacatattttctgccttcaagtaatttatagctaattgacagagtgtagaatatcacaattaggtacatcagaaaaatgactttagtaacttggcaggaccaaaaccagccaggtgcaatataacacaagataataatgagtaggtcatgctcatcttcaaagcagaagtcacagctcctaggcgacaaatatcacaaaaaaacttattcatgtttttctgttttgttccttgtgatatttccatatggtatccctgaagataagttgtatctaattagagtgtagaaatactttcggttgctagttgttagcctaatctttactatagaagctgttgtttgtctttttctgaacttttacaatgacatttaatacttaagttaccagtggtatatggtgccctagctgagtgagggggggaaaattgtaatggcagattctaagttaggattttgattcataatgtttaaactttgacactttttaataatgaattctaaatttaaagttttgattgcttgttgaaaagcatagttcaaacttgcaaattccatttttcttaatgcataccaacatttagtaaaatacctgtaggaatttcaatgaagattttagttagacaaaagctgtaaataaatattgttaaaaagaaatgggtagtatagttgagataatatctaatccatattaatacttatttttgagtttgaggtgtacttgtttttattaatacttagagaaaaaataattgtttgttggctgaaatgtttcatcttcacctgttggaatgtgtgtttgtgtgtaggttctgtaaataactatgcagtgaccaataaactgatgaaggagatggtataaacaaataaatgtcaaatctacatcaggtataagactacatgctgaattcaggtagtgtcatttgactattttaattaatcaattaactatttatttcaagtcaaccaaggattttgcaattaaaaaatacaggtactcaagggaaaaaaatgaaaggtcactcattagtaacaaaatttaatgaaggagacaataaaataactctggaacacaaacaagataaacactattgcagtaaacagaaggaagttatgatcatttattaaagtatagtacaatgtcatcacagctacagttaatacatatttttgagcatctactttagacaaagcaatgttccaagctcctgaaagatgaaaatacatacaatctttagtctcatccttcaaagtaagaaaatttataggcaaacgtttctgaagcaagaatcaaatagcagtgcaagataataagaagcactacaaaaaggtacaaacaaatccccagtctaggatgactgagggaacccttacataaaggaaagagtttaaaaattggcatgagcctgatgaatggaaaaaagagggaagaagatttcagaacaatgtgagcaaaatttcagatgcagcaaaatagaatcttgagaagaataaataaagcaaattagctagtagagtcatggactttagctaaggctaaagtgggaccacagtgagggtaatatctatttttttcagactcctaaattaatatcttcaacctgagcttcccatggaactccagattcacatatacaactgtatacttatgttctccacttaaatgtctaatagatgtctcaaatgtaacagacctgaaactgggcttctcaaattctcttgccaagcctgttctccagtagtcttccccatctcagttggtaacaactccaccctcccagttgatcaggtcaaaaagtgtgaatcatctttgacatctctctttctgtcacaccccacaatgcccaccccaaaggaaatgaagtggacagactgctccatggacctgacgggctgttgttgggataaccaccatgctcgtaactttcatcctgcaccaagcctcacctggagtgaagggagtcatagctctactctgccctgggcaatagtgccttctcttcatgcctttctgggtctcagagtgactaaagaggccataaagactgcttactttactcatttaatcaattcatggatcaatcatctaaacatttctcaataaaaccgtttagtagcttcgcttcccattcaggggaaatgtcactacaataagctgcaaaactcgccagggtctggactcctccgtgttctcctacttaacacctggttcactccattcctgccaagcctttagctgttcccccaacatgccaggcttgctctggcccatggctttgccctggctcttccctctatctggcattcccatcctcaccaccaccacaccatgctccatattgtttccttaccatatatggcaattgacgcaaattcaatattaggaagccttgtctagccactttatataaaggtgtaattaaaccatctccatatcacctgcagcaacttctagcaccattcctgtatttattttccttgttagcacttttgccactgaatcactgcataattgattgattgattgatttttattgattgtcttcctttctacaatgtaggcaagggttttttcctgttcccagaatggctacatccacagcagttagaacattcacagtcccaagtagaactcaaaaaatggagttgaatgaatgttgcatttgaaaggaatgaatccatgttaagaatatagataaatatgaagtttattcatgagctctggatttatcctctagataaatttctccaaactgtttattctctgcccatcatatttgtttcttttaaaatatatctccttaattgttatattagatttcacattgagaatgttatatcacataattcctgtttacggctgaaactttaattgttggaagtgcttaagtggacctgttatatttttaagatgacatagagggttgtcccttagttgaaaataaaggatgcttgctgcaggggctggaaagcatagagataacaacttctcattctatgagcaactcccgtgggggctgtgaaatcttagggcagagaaccactgaggtggcaaatcctgctctcactgaggaagcctgttagatggatggtgcttagtttgccaatgtgctgcttcattaattctctaaccatcgtgagggtgtgagggagactgctgaatgttttgaaaggagttttaattggaccttcagtcgatacagttttctaaaactaaaatttaaaaaaaacgtccccagtggatagggtcagtgacacataatctggaacaagaaggaacgatttctttgagttagtgtgttttagggaaacataccctatgattaaaagcaattctaaacttaaaaggtgaagcaggaaaggaaagcagccatttttttctcttgaccttagggtcttcaaccagtttctcattcacctgctcttacagatgcatcaacaatcaaaggtacagagctcagtctgaacctagcaggtaggatgcgaaaccttctcagtcatatcgtcatggtttgtttaagctaaacaatccatccaattttactttctttgtaagtctgcctaaattcaaaataattgatgggccattaattcaaatatgcaattggaattactagattctcaatttgatacctaacgtaaactacaagtttgtcattgcattaactcatgtctctttcctcatatgctcaagctttttatggaactaaaaatgattttcagcctctaaattctcccttcatatatattgattatatatcctagaatacggaaaattcttaaaaatgaaaactgaggcatatcaatcaacaacaaaaaacgtatttctggctgggcatggtggctcatgcctgtaattccaacactttgagaggccaaggagggtggatcacctgaggtcaggagtgcaagaccagcctaaccaacaaagtgaaaccccatctctactacaaatacaaaacttagccaggcgtggtggcaggcacctgtagtcccagctactcaggaggctgagacaggagaattgcttgaacccgggaagtggaggttgcagtgagacgagatcgccccactccactccagcctgggcaacagagcaagactccatctcaaaaaaaattttaaaaatgtgtttcctcctcaaggaagtgtatgttatctcaattatatgacacatattttaacagaaggtttttgagtaaaattcttgcagacagtctttgtatgaactctagatattcacagaaactagtacgtgcctttagaatttttaaagaaaaaattataatgctttcctccctgttgctctgcattcttaaaatcccagcctcctttatgtctgaattaatcagtgaaatataccaaaaaaaggtagtaaatacagctgttaataccaatttcacatctgtcataaccaattcagtgaaaacaaatctgtaacccccaaataaattccaaagtgattaaagtcataattgcaaattaaaactgtaaaataattaaaaggaactatgtgtgaatattaatttaattatagcatatagaaaacttctcaaagcataagtctaaaggcatagaattttaatctcctgtatgtcaaatttcattataaatatctaggaaggctaaaacaattcaggcaaggggacgatggtaatatatgtatgagaggtgtcataatttttgtattgttgatattcttaatccataaaacatttttgcaaatcaatagagaagaggaatatttcaataaaaaaacacaaacaatttgttaaaaatcaaaagccttgaaaatatgcatatatttaatctaataattccactaaggaatctaacctgaagaactaatcaaagataatacaaagcttttgttaaaagcaaatgcaattgtacctatgaaaaaaagttcattgaaacactacttaggatatcaaaagactaaaacagcttaaatttccaacaatcagagattgtaagttatggcatattcatactttgcaaagcagaacagtaaccctgcataaaatatccaacaacatggataatgtacataatgtattgctaaacaaaaaaaatggattatgtaatactataatgcaagttataatctggatcttcagcaaactattcagatcagctttttctagttagtgagttaatgattttccaagttttccacaataagcaagtattgtatttacaattagaaaagatgatatcttgtaaaacttgtagtactttataaccagcaaatattcttctaatgttaaataaagaacataacctcaagctcactattttttttttttttagaccgagtctcgctctgtcgcccaggctggagtgcagtggtgcaatctcggctcattgcaacctctgcttcctgggttcaagcaattctctgcttcagcctcctgagtaactgagattacaggcacccgccaccacgccaggctaatattttgtatttttagtagcaacggggtttcactatcttggccaggttggtcttgaactcctgacctcaggtgatccacctgcctcggcctcccaaaatgctgggattacaggcatgagccaccacacccagcaagctcacattgttattttaagcactgattacaataagatgatcagccctacccattcactaaggctgacataatattgtatgtgtgtgtgtgtttgtgattttattacgtgtatatacaatcttttttatttcttattaatataattaggctttgttccccacccaaatctcatcttgaattgtaatccccataatccccatgtgttaagagagagaccaggtggaggtaattgaatcatgggggtggtttcccccatgctgttctgacagtgaatgagttctcatgaaatctgatggttttataaggggctcttcccccttcactcggcacttctcctcctggccgccttgtgaagaaggtgccttatttccacttcaccttctgctgtgatcgtaagtttcctgaggcctctccagtcatgctgaactgtgagtcaactaaacctctttcctatataaattgcccagtctcaggcagttatttctagcagtgtaaaaccaaactaatacacttatattttgcaaattgaaattgtctttgaaggcaattttactttgcaaaattctttaaattgtgaacttctctaaaagaaaatgtgggtcaagaattcttatatgtgtcaagcgtttgtggcatattagtgattgtatatacccctaatgaatcatttatataccctgaaaatattttctgccctcttagcatgtaggggtgcagttcaaaacttgagatatttgattaccatgaatcttggtgcctgaggagaataagctagaaagagctttcctctttactgtctatagcaggaaccacttatatggtatctctctctaattccataattcctttcatcaaaaagatccctaaagtccattatgaagctaattaggagactcacttattttcaaaacccagtccctcttgtttgcccacagctaatatgtggcagcgaaaatgcaatttgatagtttcttgtttcagaaaggagtgaaagaataacttctctaattaaaaccactatgattttgtgggattttttctttaagtgggaggacagtgtaattacacagattggaatgcagccaaaacagtaaagtaaagttaactgcctgcaagtgaaataccacgcaagacattgcctatattagtaaattgttgtgggtggagtggaggtacatgaggatacacaggacactctctattggcctgtgaattgaatctaccactaaaaataagctaaataattattattatgaaatgtgataatcatactcatttttcccctatagtagactgagaataaatagactatcttagtcagtgtccataatttatgtaggcaatgctgcagaggatattattttgtgctggatttggactaaaactggtgtaggcaggtggaccatctatttttgtcagttgattaattggaagttggttctgagtcagtcaacggcatgactgtcacaagggcaaattggagtgtaagtttataggacaggcagcaattagtgtttccagatgttttacatggaatcaagtgaaaatacatggaaaaattaaagtagaagtaattacagtaccgatgagatgctgttaccatatttagagccataactaaaatgctaggtaaagtggtataggggctttacagaaacaaacataaatatgagatcaccaagttgattgtaggctttgctgctctgtaccattaatgctagcatgatggtgacagcaaattgtcttgtgagcagcatactataggacaggaaaacaaagcaatttgggtgctaagattggcatcataactgaaggccctgagaacaaatcttcgtcagttgttttatggagtttcatactgaaagattttttgaagaagcagatcctaggtgtggtggagatggagagatttcttaagttttcagaagtctatatgaatctattattaatttcaccagtactttttcatctttcctccccacccactctgctgtttcttgaatgtaagatatcatcaagctattccagttttttatggacggaagtgtttaactggcaaaagctgaggaaacaggaaagctgaaggaatatattttgagtagcatttattcaaaatataattattaaacacctactatgtgcaaatcattttatataacatagaaattgacaatgaacactcaataaatattgacttcatccttcttgtttactagcaaggatacattttctcagatacaaagatggtagaatatataagaacaaagattatcaaaaaatgtaatacaaaattctaagacaggaattcataacctgtgttccagaggcttgtttgggatttgggcctatgaccttattttaaaatgggtcattttgtactcacaaatgtatattttgcgtggtatgggtctctatcttggaggtaagttcatcatattttttcaagactcggtcacctcaaaaattcaaagaacaattggtttaagaaaaggaatgaacatgcctaataagtagagagcatgatgattagtacagacatttgctaacaacggctttgaaaatgtttaaacataacatatttattacctagttttagaatggcacagaaaaatttcaaggcaagagtaatatccataggaagcacttaacttctctaaaacggaaactgggtcactgaaatactgggaaggaaagaaggaaggtaaaaataacagttaagattcagtcaaggggcttgaaacttctgagacttcagagtgaggatttccataaatccacttcttcatgaaaacactgaaaaaattttcaaattaactttttcagaactctgaaaattagccaaatacatgtaacaatttgaggagtgttttatttattaaaaaaactgctgaacttgagtaagaacaagaaagtttatggctttttaacttgaccttaaacccttgcccctctccccagttttgagtagccttaaaaaacaacagtcttggagcactggagggggcagtccaattttggaactcctcaaatagtagcatccccagagtagcaccactatttaatctgtcttgaagctctctggaaaagctgtattcacagggcattgtcactatttgacctgattcagaaaccaaaagccctatctgcagggcattgttgaaagcaattacaacagcaattgtttaacatcacagatgacacagtaccagttggggtgaacaagagcctgaacaaaaacataaaaggaagacctgccaatgagatatccatagaggtctttgtaaagccctgacatattgtgagggatttagaagccacatgtataagtagggctgtgtgcatgctgaagaaagaccaaagagtgccccagtccctcatctctgactgatgttgagcccctgtaccaggaggaagtgaaggcaaaggcagaatttaaaacttcctgagcattactgaagttccccaacacacacaaagcctcttggcaaagggttgacttactggttcacagtattctaaaaaatatctgagcaatcactagctgaccacttagctaatcagagacttcagttgttgcccaatagagtaagtacagactttacagaattagccctagaaaatctctaaacaacaaacagcaacaataacaaaaatcaacaacaaaccctggggaaaacatctgactttcagatttgccacattttatgatttgcaatgtccaatttttaagagaaaaattgtggtgcatacacaggggaaaagaaattgtcaatagaaaatctgttacctgaggggacccagattttagacttactagacagactttaattaagctattataaatgtgtttaaagaactaacaggaatccttttcaaagaattaaaggacagtatgacaataattcacccaataaagattatcagtaaagaaacagaaattaggtcagttgctgtgactcacgcctgtaatcccagcactctgggaggccaaggtgggtggatcacgaggtcagcagtttgagaccagcctggccaagatggtgaaaccccatctttactaaaaatacaaaaattagccaggcacggtggtgggtgcctgtaatcccagctacttgggaagctgaggtaggagaatcacttgaacctgggaggcagaggttgcaatgagctgagatcatgccactgcattccagcctgggcaacagagcaagactctgtcccccaccaaaaaaaaaaaaaaaaaaaggaaacagaaattattttaaaaacacaaacagatattctggagctttaaagcataataactaaaacagaatatttgagtttactcaacagcatatttgagttggcaaaagaaagatcaaaagaaagaaaggttagtgaactttaagacaggtcaactgagattacctagtcagaagaatagaaagaaaaatgtatgaagacaaatgaatacagtctcagggacctgtgggacaccatcaagcatatcaacatacacattatgtgagctccagaaatagaaaatggagtgaacagggcagaaaaaatatttgaagaaaatcatagccataaactccccaaatttgatgaaacacataagataaagtcaaggagacccacacctagtcagactgtcaaaagacaaaggaaaactgttgtaatcaacaagagagaaaaaagactcatcctgaaaaaaaatttaatgagattaatggctgatttctcatcagaaatcagggaggcaaaaatacagtggaactaacattcaatatgttgaaagaacaatactgtcaaccaagaattctatattcagcaaaactatctttcaaaaatgaaggagagattgagatattttcaggtaaacagaaactgagagaatttgttactagcaaatcttccctgcaagatttactaaagggagattttcaaactgaaatgaaaatacactagacagtagctcagattcacgtgatgaaatacagagcctccagaaagataagtatacagtagtcttagttcattcagaatgctataataaaaataccacaaactgggtggcttaaacaacaagtatttgtttctcacagttctggagtctgggaattccaagatcaaggtgccaacaggttcagcatctggtagggtcccacttactagtttatagacagctatcttcttgctgtgtccttacatgacagaatggggtcagagagttgtctagggttcttttaaataaaggcattaataccattaatgtgggctccactctcataacctaatcacctcccaaaagccccacaccctaattctatcacattgggggtatttcaatatataaatgttaagaagacacaaacatttagtccagtgtaataggtaaatagaaaaagtttaactgtaattttatgtaactcttttcttctttcatatgatttaaaagacagttgcagcaattgttaaactgtgttgatgggtttataatgtacaaagatgtaatttctatgaaaataataatacaaagagatggggagagagtagagctatactggagtaaagtctcagtatattattaacttagcgttaatatgaactagattattttaaattaagttgttaagtatagttccagagcaaccactaagaaaatagctaaaaaattatagtaaaagaaacaacaaaataattaaaacggtacactagaaaatatctactgaatacaaaagagagtagttttggaagcatatagaaacaaagacataaaaactgtagagaagagctactataatggcaaatgtaaatcccaccttaaactctctaataaaaaggcaaatgatgtcagaaaagattttaaaagtgattcaactctacactgtctacaagagacacattttagattcaaagaaataaataggttgaaagtagaaaagatgaaaaatacactatacaaacagtaaccaaaattaaaaactgtgagaattaaaggaaaaatataaataatttaaaaattatagttggagaattcagtatctcactatcaaaaatagatagaacacctaagcaaaaggtcaacaaggaactagaagacttgagcaacactacaccaaccagccttaaacatctataagatactccattcaatgacagcagaatacacatttttctcaggtagacacagactattttacaagatagacaatatgctaagtcattagacaagcctcagtaaacttaaaagaatttaaatcatacaaaatatgttctctgaccacaagaaaataaaatcggaaaccaataacagagggaaatttgtggaattcacaaatatgtgaaaattaaaaaacacacttctaaataaccaatgggtcaaaggataaataacaagtgaaattttaaaatactttgaaatgaatgaaaatgagaatgtaacatactaaaacttacaagatatagctaaaatagtgcttagagagaaatttacatctgtgaatgtctattattacaaaacaaagatcttaaaacaatagcctaatcttccaccttaagaacctagaaaaaggagagcaaactaaacctaaagcaagcaaaaagaaggaaattatttcaaaagttagagtaaatgtaaatgaaatggagaattaaaaaaacagagaaaaatcaaagaaaccaaacttggtttttttgaaaagatcaacaaaatgtataaactgaagctagactgaccaagaaatagagcatactcagattactgaaatcaggaatgaaaaaggagacagccctattgtccttataaaagcaaggataagaaaatacactattatagtatatattcttaaaagaaaatacactattatattcttataagaaaatacactattaacaaccccataccaacaaagtggataacttagatgaaaccgataaatttctagaaaaacacaaaataccgaaggtaactaaacaataatggaaactgaatagacctatagcaagtaaaacaattaaattagtaatttaagatattccagtaattaaaaatttccaggcccaatggctttatgatgaattctaccaaacatttatgggagaaataaaaccagttctacacactttacacacacacttctgaaaaatagaagctaagagaacactttctaaatcattccatgaagccagtaataccataataccaaaaccaaataaagatactacaagagtaagaagctacagaaggggagaaaatatgcacaaatcatatatctgagaaagaatctgtatcttgaatatgtaaaagacttaataactcagtaacaaaaagacaaccgtagacaatggattttgatagacatttttcgaaagaagatataaattattaataagcaaataaaaagatactcaaaagcatttgtcagtggagaaatgcaaatcaaaattacaatgagatacaactttatacccactggggacagctatgataaagaaaaatagacaattaaaagccctggtaataaagtagagaatttagaaccctcatacattgctggtgagaaggtaaaatagtatggccacttcagaaaatagtctggcattatctctattcaaaagaaataaaatcatatgacccacacaaaaattgtacagaatattcacagcatatttttcaaaatggtcaaaatcgggaccaatcaaagatgaatggagaggaccaggtgcgctggctcatgcctgtaatcccagcactttggaggcagagatgagtggatcaccttaggtcaggagttcaagaccagccttgccaacatggtgaaacccctgtctctactaaaaatacaaaaaaaaaaaaaaaattacctgggcatgggggcgcacacctgtaattccagctgctagggaagctgaagcaggagaacggcttgaacacaggaggtggagattgcagtgagcccagatcgtgccattgcactccagcctaggtgacagagaaaagctccatctcaaaaaaaaaaaaaaaaaaaaaagatgaatggagagacaaatatgatttggtatatataatggaatatcatttggcaataaaaaatgaattactgatgcatgctcaacatgtatcaaccttgaaaatacaatgtgtcaaggatgccaatcacaaaagtacttatgttatataattcaatttatatgaaataggcaaatttatacaaaccaaaaataaattaatggttgcctagatctgagaggctgaaagaaatgggggatgactggtaatgtaggtaaggtttctttttggggtgatgaaaatattctaaaattaggttgtagtggtggttgcacaacccaggtaatatcctaaaatccactttagtatgtcatttaaagtaattgtgcacttaaaatgaataaatttcatgtaatgtggattatatcttaaaacaactggttttaatttttttaagccaatgaagaaatgaagtgctagtttttatgtttattgcttccatgagaatattatcatctagaataacatgtaatgtattgagtatcaaactccagcatatcacctaataatcacttggccttaaacaagttacttgaatgttctcagatcctggaattttcacttaaaaatggaggaaataatacatcacaggggttttgagagaatgtattaagtaatggcacactttagatccctaatgaatattaatttccttcattccttccatcaggggccatacactcaagagaaaaataatagtcagggacaattcttaaattacgaatagggaattcaataaatacaacaaaccaaagattatatataaattttatgtttttgccaatggaggggaaagataactaaatgaggcaaggagaagaagaaaaggtggatagggaaactgcacgaaaagagagagagaagtcagatgaacaagcacaatgaaatagactcaaagaataacaacttatgtaattttaaaagacatattgggccaaattaaatggtatttggatcattctaattaaaattaaaaccaggctacatttgcttgttcagaaaaattcatctaaaggtggaattttgctagtggcccacagggctttatatctcaatttggtttggaatctgatgaggtgattaagtagaaaaccatagaaacataaatgtcaccaatagaactaagcaaatacgtaacctctactgcactatcaaattttttcttgcactaaaaatttaaagcttttttattgacttttcattgtattaattgtatgctaaagaaacttagaccaaaatatactttcatttgaatgagtttcaatcactggtcttagaaagaacattcaataatatttgataggattttaccgctgtgaatggattttttaaagaaggagacatactatatagaatagcagtataaaagaatataatcactgaaagactaatttgtagttttgaagacatagcataataaagttcttacaatataataacctagtacatcataggctgataccatactagacagtacatcgcaggctgaatactgttctttcatgagatttatctttgaaaataaaagtcatctagtttctacaattaattaatcgtgtatccttacagtttatattagctaaatattctcagaatacaatttttaagattcttgttttatctacatcgcaaagtttattcttcagtttttgcattttcagttgcattaatattatttgaatgtgggatagataggatatgttttaaattcttgctattaagcattgatattggggcttaataatggtttctctcaatgtcctactcagagcaatttaagtcacataatcccgaccagaagcgtatctccatggttgttttctatatccctagtacagcagtgataaagccatgaatgctgaatgtgccgtgttttttcagccaacaatgggcaaatgacatttctaaagctatgtatcagttcctacttctcatcattaatcccctgtcccttccaaacctcaactgttgctttaaaaaaaattaagaagacaacaataatctcttaatgacaccctgcagcagctttatggtggaaagggaaaggggtcatgtttactggcacatattttctttgagtgttttctccctttcgcagctcccatggaaaatttgctaacatatgtacttgcttttgttaatggcaatagtagatttaatgtgtttaattccctgctcccttttcttcctctaagtggaaaagacctctcaagcagtgtttatgtttcaccttcaaagttttagctggaaaaatgtttttccgtatttaatgaaagtttggtgactttctaaatttaagcaatttttaaactctgagtttaaaattcccccatctctaaaatagagatatacctaacaataatagccttttgtggaagattatctgagcaaaataaattagaaacatctaacaatatttcttattatttttataatcttcattctgagcccagattctctagcaaacagagaccaagataaaagcttattggccattattttattcaagagtataatttcagggaagtaggaggaaggaaaaagagagatggcatccaaaaagtgagaaatatatatatatatatatttatatttatatatatgggattgcaaagcctgacgcatcttggtaccaagcaaactgcagacatttttgacaatcttaagctaaagcctagatgaatcactgcatctcagggcaatccatttggggaaataaacagaaggattgatctgctagttcccatctccttaagttcaaagattcacctcgagggacattaacttccccacacttccaggtggcaagtgcctggattctgagatccctggaatctgacatctcaataccaacagggaggccctggaacaggagggaagaatttcaaagcacaggctgtggagacagaatttctgtcagaattgtccatctcgacttctcagagcccatgctggtcacaccgcagtaacagggccctccaagacaggtgaggctgaaagaatggggcaggcacagagaattatctgattcactctcctttaaaacaaaaggcaatatattcatttgtcaagtgacaggaagtcttttgaatcaatgtattcttgttctgtttgggagttaaaggcagtataaagaagcttgattataatcacttacaaaaacctatgaaaaccagattttttaagatgttgcaactaagtacaacttctggcttttattataagtctttttagaattgtatttttaattgacaaataattgtacatatttatggggtacagcgttatggtttgatacacatatacattgtagaatagtcaaatcaggctatttaatgcattcatcactgcacacacttatcatttctttgtggtgagaacattaaaattcactcttttagcaattttaaaatatacaatacaatattattaacaataatcaccacactgtgcaatagatcagcagatcttattcctcctgcctaactgaagcttcgtgttctttgaccaacatctcccctttccttgtccactccaaccatatcccacagcacctgggaaccactactctgctctacttctgagtttgacttctttttgattccacatgtaagtgtgatcacatagtaattgtttatctgtacctggcttacttcactaaaaataaagtcctccatatctatccatgttgtcacaaatggcagaactttcttcttttttaagaccaaatagtattccattgcatatatataccatgttttaaaaaatctatttgtctattgatggatgcactctgttcccctttcttggctatcatgactaatgctgcagggaacatgggaattttacagcgttggcttttttatcaacataaatgacttaatgttgatgataaaaaacaatgctgtaaaatatttgaagaggttgattctaagccaaatatgagaaccagggcttatgatacagcctcgggacatcttgagaacatgtgcccaaggtgattgggttacaccttaattttaaacatgttaggggcacagaagctacaggcaaagacataaatcaacatatgcaaaacatgcattgttttggcctagaaaagtgggacatctcaaagcaagagcttccaggtcataggtggattcaaagattttccgagtggcaattagttcaaagagttaaggtttgctggtaaatatctcttattagatcttaaaaggtgtcagactctctggaaaagacctaataagggaaagagatgctctatagaatgtaaatttcccctacaagagatggctttgcaaaatcacttcaaaatacgtcaaagaaatctattttggggtaaaatactttgatttccttcagagtctgctgtcatgtgatgctatgccaaagtcagggtagaattgggcatcttatttccacacagagtctgtttttcagtcttatgatctctattttaatattaatgctagtcagttgtccctaaacacaaaagataggagagtataataaggcatgtaagacttcccttccagtcatggcctgaactagattttaagttttctttgggatcctcttggccaagggggaggaggtccattcagttggttgggggccagggagctagaattttatttttgatttacaatgctgatttcaattcctttgaatatgtacctagtagtgggattgctggattattataaatttttatgtgtattacaattttgttaattaggtcactgtcttagttagtttgaactgccataacaaaataccatagactgggtggcttaaacaacagaaatgtgttttctcatagttctggaggatggaaaagctaagatcgaggttctggctgatttgattgctagccagagctctcatcctagctggtagtcagccaccttctctctgaattctcacatggcagagatagagacttctctctctcttccttttcttataaggccaccaattttatcaaattaggaaccctccactttataacccttttgactttaattatctccttaaagtcctgtctccaaatgccgttacattgggggttagggcttcaacatatgaatttgagaggaacacaatttagtccacagcatttgcatatcacagaaaacaaatccatagaaatgttaatacaataaagaatttgagtggtttaaaacctttttatttttgtgaatgctacaattaaaatatttctgcgtgcaaaaaattgtgagtttttcttgtatagagtaaaattttctgatcttaaaagcaagacctatgacaagtagaaaatattaatgaacgctgaaagcattatatccttgtcattttcagataagaaaactgtagttagtgatgcttttcaaaattgttacatttgtgaaccagcaaatgtatgcacacaggattatctgagcctaaacatagtgtcataaccttaaattgaataagttagattaaattatttttaccagaaaatttatggctgatttccatacaataatccatttagtcaattcaacaatttacagggctgaaaatatttattgtaacttgaaattcattttatttcaagcaattaaatcacccagaatcctccagatacaaagtgtgttaaatgtaacctttaaaatgaatgaatgagctgaagacaataagggaagtccagggagcagaggaaaaggcaagagcagggtaccaaggagaagtataacgttgatgcttcctcacaacttgagggcaactacggattcagacacctggagtttgatgccagcacaaagcaggaaatcggactggagatcaagtcatacacagctgggacccagaaaggtatacacttggccttggagaggaaggaggttaggagagagtgacttacaagaaaacatgacctgcagtgataaagagtatagaaggatagatgcagccgggcatgttggctcacacctgtaatcccagcactttgggaggccaaggtgggcagatctgaggtcaggagatcgagaccatcctggctaacatggtgaaaccccatctctactaaaaatacaaaaagtagtcagccatggtggcatgtgcctgttgtcccagctactcaggaggctgaggcaggtgaatcccttgaacctgggaggtggaggttgcagtgagcagagatcgcactactgcactccagcctgggtgacagagcaagactccatctcaaaaaaaaaaaaaaaaaaaaaagaagaagaagaaggacagatgctagatagatagatagatgatagatagattaaaaaagagatatagagataaaggtatatttctcagccttggttctgggtggaggtttaaaaataatatttccttgagattttgtaaatgtaaactaagtcatatttagggttatggagccagaaatcacactaacagtagagttcacaaagctgcagagaatattttgtttgtgatgaatctagatctttctagcacccaaagagatatatcccccactcaagtcatccagaactcacaaatatgaactcaagctcaaagacacacaaaaaaataaggaaacaagcctcaaagtgctggagtctacagaaacaacaaggaacataaccagttgcatgagatttcagatatttgccttatcagatgcataattaaaataagaataaatgaatagatgttgtatttaaataaagaagaaataaagaggctaccaaaactgatcactcatatttgaaaaagaacaaaaaataacttctacttctgagaaattttaatgaataatattaaatggagcagttaaccagtagaatacaactgacaaaaagattatgaaataaatataaacaaatatgcatatacatatacatatatctgataacctgaagtatatttattgatatatatattaccttatatgtatgcatgtgtgtatcatgttgaactatatgaaattgccatgttgtatggcaaaaacagtcacatataggcaatttcatatggttaagcctatatatgcatattggattgaagatgcactgtataatataggttttccatataaaggtgaaaaaatattcttttgctctaagaattctcagagttctgtcccacagcagatagcctacatgagagtaatttttttatcagaattgtggaattcacacacaggtcatatgcttagttctgctcatgataatgatgctcaatagttaattggctttgtcaggcactcgtctatatcttcccaccttcctctccaacagtcaagtttctagacccaaggctcttgtttctccaaaactgcttgcagaaatagctatgccttctttgccatttattttaggtcaccacttattagtgacatctgatattagattcttgtgagatgaagattggagactggcttaagtatctgtcaggaagcttctctattttcagattatattgcatacaaaaaccttgcaagccaaatctgtttcagaattaaaataacatgagcaacctcaagaaaaattattccatgtgtgcacacgtatcaagaaaaacactgcttccatcatgccaccccacttcattgcttgcagggatcattgaaattcatttactcagtgatcagaatctcctgaaccctgcctccagacctcatttccaaacatacaccctaacctccaaaacaaatttggtctttagccttgtccaataaaaatagttattgttaaaagtccaaactctttaacatgctattttttaaaagcccggggttggggaggggggtgggtaagggatctccttactccacagaacttctaatttcccagacaatcagttgttcaagaacacaatgccattcctcatgctttctttgcctataagctgttctcacccacttggtgaaatctacttcccccttcataggtcaacccctcagtgaagtcctccttgatgtcttcagcagcatttaatggtttttcctctatgtccccttagtactttcttcatatctctacttgtctctcccactagactgtaaattcacttttgtcaggaccatgccatctgagtaccccagtgtctaaaacataacctggtactatatatttctgctgaataaatgaattaaaaaacaaatgagtgcaagttatttaaatcagaggaatcatgatagaaacattaatattttaatatgtaacagaccacaagaatgttaaaagagtggtcttcaaactcaaaagtgtatcttcccaatgacaccagccttagaagaacagtttctgtgttactattgtcatgctggaattcaaagggtttttcttggttcttatagagactagagcagtacatctccaaggctaattattcttctgatctcatggtttgatttatgtgaattgtgacaccctataaggaaagtaaaaagagatccacctagttataaacaatgctcattatagaacaacctccagccgagccaatgcagaaggcctcagggaatactaaaaaaaagatagtggattttttttccttgcaagcacaaaatattttttaaccataaaaagcaatgtgcaggtttgtcatcctggtgaaaggatgattaatttccatcgtgttagaatataacatacggattaccctagaaagttttaaattttaccaaaaaaaaatcaaggaaaaaatgtaaattgcagaatgattattgcatataaattttatatacttcttttagataatatagaagagatagccactcacccaccctgagttttactgtacaattctgtttttttaattgaaactgcactgaagcttttttcttcccgtgttttaaactgtgctgaaattataagatttgaaaagcctttgttaatagctagagagtcctgccattaccgaatgccaagagaataatgaaacacctaaaatgataaggcactagtgtctgagcagaatagacctttaattggaaaaagttcatgcattaatattcaacattaagtggtgattaatagatacaccatgtgggtattttttattttaggaggatagataacagcatgtccaattttaatgtaaatctagtgacaatttcagtgtgttattctaaaatgctctatctgattagtttcagaggcgtaaaaagaaaatcttttctagtgagcacatcctccgtaagtgttaacagcaaagctccttaaaataattttgttctctgaaattgttgccatagctagctggaagagtttcatgtttaataaccacatgtgatatctggttttttttaaatgaaatccgcataaagtgttcattttttctccattctagaaaaaaaaaatctactcttattgacctctttccttactctcactgactgatcaaggaaaaaggttttattttctctgtctttttatctattttgatggtatttttttttccaacgtgattgtgccagtgcactccagactggatgacagagcaagaccctgtctcgaaaataaataaagaatttttttttttttttttgagacagagtctcactctgtcacccaggctggagtgcagtggcgcgatctcggctcactgcaagctctgcctcccaggttcacgccattctcctgcctcagcctcccgagtagctgggactacaggcgcccgccaccatgcctggctaattttgtttttgtatttttagtagagacggggtttcactgtgttagccaggatggtctcgatctccttacctcatgatccgcccgtctcaggctcccaaaatgctgggattacaggcgagagacaccacacctggcctctccagggaatctttaaatagccaggtaataagaattctcagagtgaatagtacactgaatgtgaaagtgaagaatgacatccaggataacttttctctctttgtattcagggggctcagtctattaataaagagattttgtctaaccatgttccccacatattgctgtcaatagagtaaattgctgttatccatttaatgtgataagctcattatttctcacagcttcatctatcacccaatcccatcctttcaccttaaatctagacttctaatgccaaacaccttctggatagaatttgtgtttaactccacatctgaggttaaattttaatctacccaacgaatgtaggtttccttccaacattgcctgtttcttattaacacaatcagttagttaccctggctcaagaaattgagaagaaaattggacttatttgatccttcacttcatgtttctagagtctccaaatgaaagtttccttaaaaaactttttcaagccttgttttaatctagatcccacaccaaagcagaacaagagaccaagtcttatataaagttagtttatttgagaatataattatagagaacatacatgagaggcagcagttttgaccagggaaggagaaaaaaaaattcaaatcatgctattgatgagcttccccaagagcaagtgttgctcaatctcacaggattttctggggagccttatgaaataagtttgagaactaatagcttagggacaacaggggaaagcatttatccattggtccccatccccattacttaaggttggaatttaagtaatgcacttctgcttgtgcatgaatgaaggccaaatgtggtcccatggtgtattagtctgttttcatgctgctgataaagacataccagagactggataatttataaggaaaaagaaatttaataaactcacaattctgtgtggccggggaggcttcacaatcatggaggaaggtgaaaggcacatctcaaatggcggcagagaagagaagacagcttgtgcagggaaagtcccctttataaaaccatcagatctcatgaggcttattcactatcacgagaatagcatgggaaagacctgccacctcccagtgggtccctcccacaacacgcgggaattatgggagctacaattcaagataagatttgggtggagacacagccaaaccatatcacatgggtatcccacaccatggtaccagagaagtctcgtggcagaaaataagaattatatggtctaggcccaaagtgagataccataaggctggactggggcaaagctaattgaaacatttattggaacttattagcacagcagtggctgggtaagagatggtctgagaggataagaaatggccaatataccctgtcttagtctgctcaggctactataacaaaatgccatagactgagtgatttaaacaacagcaatttatttctcacaagcatgaagtctgggaagtccaaggtcaaggtgccagaccattcagttcctggtaagggtccttttgctggttttcagacagctgtcttcttgctatatactcacatggtgggataaaatgagagtaagctatccagtctcttcttatgaggacactaattccatcaacgaaaaccctacccttatgaccttatctaaagtaccttctaaaggccccagttccaataccattacattgggggctagagttcaacaaggaactgtgggaggatgtaaacattcagtctataacacagcccatcccttgcaccattcagatccaaaatgccttttataaagtgcaagcaatcatagagttccccttcaagttcatttaagtcacaatctctgaaaaggtttagtaccagttattattggaacaaattccagtcttcactattgcagccaatttcaaggtcataattcatatttataatctcccttctttactgtttattctattcatttccctcaccatttgtaacactttggctggcctagggttctttgctagttggacccagacttttacacttgagagatcccagctcttagttgagctgcatttgttatatttgtccactcacattttccctagacctggaaacacagatattcacccctcatgaacactgcgattccacacacactccttcatgtccccattgcatctcaccaatcctagcacttcgtagaaattagggtcagtccctctcttagaatagtcattactcaccttggctaccgcaatggcatgggcagcctaaagtgaccaagtggtagctgtagtttcaacttaaagtgagacagagtaaaggttccactttgtcttctggtcaaaacaatctctttctagaaattaacaccatgaatcctgcaaaacctgtttgtggggatggggagcacagatttcacaagtgggtcactgggaatgatagtgagatgagccaattctacttttgccccttggttctgggaccaatgtattttagctactccagacagcaccatataacagccatcgactgagtgcatgtatcacatccaagagaacagcaacccaacccataaggtattatacccaagtttttgtcttcactggggcctctagtaaccattcaattattctggttctaaatgatgagatatagacagacaagtgggctgtgtgtttatatgcccattcttcagtcttctgtatcataaaactagtctcctagactgagaaaatttagtgtaagaaaccatacaaatatatgtatcagatgtcttataagccctaggacaataatgatattagcagtgaccccagaggaagaaaaggcaaatccgtatgagaaggtgtcaattcatgagaggattaatttctgctcctccagggaaactgagtctaatataatcaacctgccaccaactggctatagccatattcttgaagaatggtgttacaatgagggcttagcatcattttgtgtgctggctagttggcagtagttagataagctttaaagaaggggagcccaggccaggcatggtggctcatccctataatcccagcactttgggaggccaagatgggtggatgatttgagatgaagagttcgagaccagactgaccaatatggtgaaactccatctctactaaaaatacaaaaattagccgggcatagtggcgcacacctgtaatcccagctacttgggaggctgaggtgggagaattgcttgaacctcggaggcggaggtttccatgtgctaagatggagccactgcactccagcttgggtgacagagtgagaccctgtctcaaaaaaaaaaaaaaaaaaaaaagaagaaaaaagaaggggagccctgctgtagaacctgcatagatatctccctattattgtagtcactctgttcatggccccatcctgctagcactggggttgttaaaggaagaggcttgctgacatccacaggacaaatcttatgtatctggttaatgagtgcctcttgtgaggtagatgctccctgatgggcattaaaatgagacacaaatgaacactttgtggtcactttcatagatccaattgcatgtatctttctatgattttgttgtttatttctaattgtctttctttggagtcttaaccaactagccaaaccattaactgcccagaagcccaaaactcagatcatgttttcttgcatgcagagcgaactccctattgttatctttgaagttctgccttccacatgttttcttggagccatccttggatgaacctatagtgtaatgattaaccagtaaaactaacatgaaaaaaaaaatcacaccaacatgtctatgaatcaggctcaaatttctgattcctttgtcatttagtcacagggaagcaaatgatgccatagctatgagtggtgggtaagagactggtacctcacagataccttaggagttttcccacctgtttgtataatttactacatcttctggaacttctcaggcccaatattgaatagcacattcataatggatcattgctcttcctgctcaactttatgacatagtagattcgataatatccagctcagtcccatagtcaatttgtgttccaagattgtgcatgcagcctctaccagaattcagtatcatgtcaggtcaggaattatttttcaaatgttccataattctctgttatagaatgaatggccttgctctagtacactaggattttttttttttttttctgagagtcttctgtttaagtttgtcttctgcaacatacaggcaacttgccaggacatctaaaatcctacccagttcttcctaatcatgtcaaattaccatttatgtcactgtcttagtcagctttctgttgctatgactgaatacctgggactgggttatatatgaagaaaagaaatctatttcttacaattttagaagctaggaagtccaatatcaagagatcccatcttgtgaaggccttcttgcaggtgaagggggactctgcagagcccagaggctatgcagggcatcacatggcaaggaggcttaagaaagagggcctatctggctttttataacagatccgctcttgtgacaaccaaccaactcctgtgataacccaatgatctattaattcattaatatattaagccatgaatggactaatacattcatgaggccagagccctgatgacccaatcatctcttaaaagccccacctcccaatactgttacattggagattatgtttcaatatgagtttcagagggcacaaacactcaaaccacagccaacatagtgagccaacaggatgtgtttcagaatattaaaatgatgaaagtcccaaagactgtttagtgacagaaagcaggagatttaacatagctctgagataaagcaataaatgtatattattcttcatctgtgtaagagtaatctgctttatttctcttactgagagggactgagggatcacatccaccaaaccagtagtgccaagcagcggcataccaagtgccagaggctgagttgatccattcttgaaaagatactaccttcaacttgtaatttgtataatcatttagttactttttagagttcattgtcatatgccccgatctattggttttattcataggctgaacaagaattaattagtgttatgaggggactaataacttatgcaagtcttaagtatttaatagctgtgttaacctctgaaattccttttgccatgcagtacgatttctgattaccatctttgctgaaatgggacaaggtggggatgcagattaaggagattttacttggcctttccaaatataatggctgctgcttcataatcaggtagtcagtgtaaggttcttccgtctatagagtatatttatccaaattatatatttaggtacctagggaattaactacagggcttgtctagtttctgtaagatttatttgagatagacttcaacccaaactctacttatcaactgaagacaacacaggaatgaaagaaatcccacctaacagaacagatgagaactctagtaacactactatttaaaaaggcggcaaagaaaaacactcagcaaaagggacagaggaagagagatcagaacagagaatgaatgagagtaatatgcaacaaacctaggaaagaaaatattttaaagagaaagaagtgctcaccaatgtgaaataccactgagtatcacaatgggataaagaatgaaatgaggcaaatagttgtggaaaacaggaagacattattttcctttgctagagcagttgaagcagaagagcaggagcagatgtaggatcacggcagggtgagaagtgtctggaaactgaggaaatgtaggcaatcgagtttaaatatttcagtaatttggcccttggaaagaggaagggtgaggggatgatggcttgaagaggaggaagaaacaaagcaaggtttttgtggttgttcctgctgctgttgtttaggattgggatggtattaatatgtcttaatcagatcacaaacataagtcaaaatataagagagttcacagagattcttctttatcccaaaagtctccattcttctaattagaagaatgttaatgataaaaaaaaaatcttcctatagtctctttcttgtattagaatcattggtctcttatattggctgttttcatgtcctatatcttaattttattttcttattgctggtggcttaatgtagtaaattttgcaaaactattaaattctagactacagcatgagagaagaaaggaatagtcacaattacctggcctaaattgaagctgttcaaatttgaattattattgcttttgaggagacagcagcctatttcagtttattgttccttaatatatgacagcactggacaattaaagatcacacacacacacacacacacacacacacactgatgatggaaactcttgtattgcaaaatgggatattctggtgtgccagaaaagattgattaagcaatgaacctcagacaaagtgtatggttgtttccaaataatcaggcctttgggattattaaggttataaatgaaagtaggtgtctaatttctgatgaatgcatttaccactgtgaacacagatcaccagtgtgcacaagcatacatctgtgtgtgtagtacactgtttttagaagatcccatattctatagaagttaatttcctttattgctttttattcatagagtgactctgaatgtgttctcatagaaataaatctgaatatatgtgatgtgtgttgtgaagatgtgtgtgaattcatacagaaatacgtaggttcaggtataaatgaacatatttgggcatatatatttgtgtttgcatgtgaaaattaaggtttagtgacaagtgctgaactcaattgtgttgcacttgtgtctttaaatataataaaacattttcttttaaatgttggaaaataattattaggcatgtatcattaactgataaaaacataaatttcttaagaaatgctatagccttaaaagttactaaattacaaaaaaaattaaattggagttattgaaaaaaaattgctctaactcagccctcttttatagtaaagtattaactataaaacatgtgaatccaaaatattattcttaaattgatgtgatattaatgtatgtttaggaaaaatcaaaagggaattcttcattgaacaaggaatctagtaacagcacttcatagagccacatcaggcacctacaggctcattctctattaagtttttcatctaacataggctcgctcttcaacactgtatggacttttatgattctatagaggaagaaaataaaatggaagtcaaggaagcatttttattaggccatttactcctcttaatatagtctttccctttgagcatttacaataaaaatggacttaatcttttgccttcccatgggaagtctaacaaaaaatggaattgtagaaagaccacatatatcaaagtatttttagaaactgctctttcaggaagtggctaagttctatggctgatataattaagtcaatctcagggagcttcaccattttttgacacccagaagcttagctttagcatgagttggaattttttttcttttcttataatgcgccactaaattctaagaccattagataattgtcctcaatagaaagttcctgtaatacattgaaatcatataatattttagccactggcatatcataaaaatttataacccaaagactacatttatttctaattatatttgctttccttagccaccaagatctaagtaacagataatatttatatttctaacaactgtgttttatttatgcaagcgaagaacagaaataagctttcattaagaaacaactatgtgcctgccactgtgaaatatgctttcacatatatttctgactccttgcaataaccctaaaagattaatatcattaactcattttatagacaatacaaccgagaagttagattcagatccagatctttctgattgaaaagcccctactttggactgacagagagaatgaagacttacttcagtttgattgtcttgaatgggcttcagttattcactgttctccaagccagccacacttgcctgaaattggatttcacaggttcattttacctccaactgagaatatggacatccacaaccctcagtgctggcccgtggaagtctcaatgacccacaaggcatagggtttgtggctttggtcctggttcatgtatccatcaaccaaccattattgagcacctagtattttaggggctaggaagaaaacagaaaaagtttcagcctttgtggatcttacattctatcagttctatgtgtttaggtgtagggagatatagataaatgcataaataagtctctgaatactctttgaccaacatcaccaaaaccatacctgcttaaggacttaaatctttttaaggtaggccttatggaagttggggatatgcattattatagcaatggattaccatctgccttgacccatctacaaaccaccccagtttgtagttaccctgaataatttaagagtcaaaggaataaaccccaagtcaaaaccagtgtccccaaaacaggggcatgaggcgaggcaagggttaattgttgctcccaacacagtgctgctcccatctttaatgtgaagataaatatgagagcgaaaaggagaaatctaaagtggtcgtgatgggtctgatttaagtgaatgggagccacttcaaatgctaacaacatcattaggagcacataaataggctgctcattgtgtcggtaaaagcggttgttcacagcagcacaatattgtttgaatgttcgaaacaatctcttaatataactccccaccaatttttgttttggtttagtgtttttaaatcatagttctttggcaccctgaagaaagtcttgttcccatgtgcatttttactttctctcgttatgttttgtctttgaccttctgagcgcagtggagaaaacagacgtgttccaattccagggctactatttatatgctagctatagctatactttttccaaaaaaaaaaaaaacaactctccgaatcttggcttttaggaagttcatttttactatatgaacaataacgcctaccacagagtgttttgagaatcaaatgaaacttaacttgcctaaatgcctaagtaggcatctggtaaatttagctaaatccctggaatatctgttcggtttcaacaccatatgaatgtaatattttacagaaactctttttttttttattttgcgcctgattcaagtagatcttcaatgaatatttatgaattaaatattttcaacataatgcacataatgaaagtaactatgtacaacttgatggttgtcatatttggggcatatcaaatcattgtaccatgagtgtattaattcaggatcaaaacccagttttcttagtactttttctctttagagtgcggctcaacactagaagagctctttaaacatcagagctgctccacaatggaatgaattggatagttaggggtaaactccacatttctgcacatattaacaaaaaggctgaatgaacacctatcaagaaggtggtcggacaggatttccaaattagttgaaattggccccaaatgacttccaagttgtcccctctcaatgatctcataatactaaatacatagtgtttcatttagatgcaagtaagaaaaaagaagctttgatttcctattgcatatttcacaggggtactttgagcactactccattccaaattccctttatagaaaataataatccctcacaataaaattccctgccaaggcactattctgagctttttacatatattaacatatgtagttctcacaaaaaccctaagaggtatgtactggtggtattgctctgtcacacataaagaaagtgaggcacagaaaagctaaattacttgccccaggtaaagtaaaaaagtaattgttggagctaggagttgaatccaggcagtccagctctgaagcccactagcatgcagtaccaagggcctcacataataaaatctggcttctcatagatccagactttgtcccactaatctagaagcactttgaaggcaggggccatttctgttttcatttactactgcacctacagtacctgacatataatcgttaattaatgaataattttgtttcatgtataaagattatcacttatttttcatatcttgtgtcatagaaaaacatattgcttagctttcataccaaggtattatttactatttagaggtaagaagtgtttcagaaatatttgtactgcattcagaatcaaaagacctttggcccggcacagtggctctcacctgtaatcccagcactttgggaggctgagacaggtggatcacttgaggtcaggggttcgagaccaacctggccaacatggtgaaacctcatctctactaaaaatacaaaaattagacgggcgtgttggcgcatacctgtaatcccagttactcaggaggctgaggcaggagaatcgcttgaacccaggaggtggaggttgcagtgagcccagattgcactagtgcactccagcctgggtgacagagcaagactcttgtctcaaaaaaaaaaaaaaaaaaagagccaggttcgagggttcaagcgattctcctgcctcagcctcctgagtagctgggattacagacatgcgccaccacgcccagctagttttgtatttttagtagagacagggtttcaccatgttggccatggctattcttgaactcctgacctcaggtgatccacccgccttggcctcccaacgtgctgagattacaggtgtgagccactgtgccaatgtgccccattttcttaggctaaagcctgaagtcctaaacaagacctacaaaaccctgtgtgatgaaacccccagcagcctcacctgctgcaccttgtaccgctgtgcctattgttccctgcctttagtcaatctcaccgtcatttcttcttcatgcctgtgtcattcccatgtcagtggctctgcatgccattccgttggcctagaacatgctctcctttccccactgccatccttacctagttcattcctactccacaaaagctactctctgacaaagacacagtctccaactcctccaactgaggcaccttgcatcatgacaggctttcatcatattctatacatttccattgtgcaaagtaccaatattttaattagcttattcagtttcttattcatttgttcaacagattcttgtaaatgagcacctattttacactgggtacttttctagtcacaaaatatagccatgaacaaaatataccaaaactcctaccttcatgtatcttccattctagtgagtaacactaagtatcctcactaaaatataagttacatatagtctgtgactatttctgtcttattcactgatgcatcccctagcacctagcacgaattgttgcttatggtatatttcagcaaaaatagcttgggtaatgatagggaaacaaagaatcttaacattttagtggcttaaagcaatgaagtgttttcgcttttttgttttgtaagtcattctatatgcccatcaggttgactgggaatgcttcctatatgcccatcaggttgactgggaatgcttcctatcttgccacagtcattcagaaacatgggccagtggtacagacattatctcaaatattgccagtcatgacagaagagagagaaaactattcagagatttaaccagtagttaaatgactccccagggttttagccagaagttaaatactccagcttagacatgtgcaagacacttccacttacgaatcactgctaaaaactagtcatctccccatatgcaactataagtgactgcaaggaaaagccatattttaattgacagctgtactactggctatctcagatggaaaacaagaaatatttgaggaaaagaagactgaataacaatgaacagtagttgtgatatagataaaagccctacctctttgtctaaaatatacctgttcataggatgtgcatagcatggatagattaggctaatgataacataagtttgcattctttcagcttacaaagtctactgatagtttgattaaacacaaccaagaatgacaaatttgctatccacaacatatggagtagacatcctacagacaaataactgagaattcacagtatattaaaaattgtttattcatatgaactacaccatatttcataggtcaatttcattagactggctcacatggctggtctggcttagacacagtctacagagttgattaaaaagtaagattgattgcacatcttgttcttcttgctgactataattttgtattttgcctgaacattcaattttctatgtttaattaaaaattaattaaaatttgttagagtataaattgcatctcatcatttcattgaatcctaactataggtcatgcctcttaaacgcagaaatggtctaacattttatttcaatatgaagtagaagaattgtcaggattattttggtgcccagatggggatttggtattcgtttaactaaattctgctttaatgtagggcatgaaaggaggctttgggacttaatttagaaggtttagcaagagtgataagaaaacccaataggaagccgggcacagtggctcatgcctgtaatcccagcactttgggaggctgaggcaggcggatcatgaggccaggagatcgagaccatcttggtcaacatggtgaaacctcatctctattaaaaatacaaaaattagctgggcatggtggtgtgtgcctgtagtcccagctactggggaggttgaggcaggagaatcccttgaacctgggaggcagagattgcagtgagcagagatcatgccactgtactccaggctggagacagagcaagactccatttcaagaaaaaaaaaaaagaaaacccaataggaattcctcctcaaggtataagatttttgtaaaatctgtttgcttctgcctagtggaatcctcaactacaaaattctgatgattataagaccttctgaaggaacaatccacaatactatgtcttagatcagtgcttcccatctggggtccatggacatacactcaggagcctaagaattctctatgtaaattgttaaacgttatgtttctatttgataacaatatatattgttcaaattttataaattctacataatcagggtgacaaatgacaaatgttgtcatttgcctttatgtttgttatttcactgacaccaagcagtactataatgctttagttattctaactatttaatatagtagagaataataagagaatagtggactcaaaccaagtatcatataaatgataagctaagtaaaggatagttttaaaataagaagattaacgtcaacataactacataaaactaaaaagaacctgtactgtcacagtcagtacaaaaatacacccaccaaatgcactgtagagtcagcaaagatcatctgccatgttaaggcaatgctgacaatttaaatcttgagctttttagttttatttgattggtaaattgtgttatattccatatgtaccataaacatttgatttcttattcatctgagagtttatatctgatttgacttcactaagaataaaattcaaaccccttactatgatatataagtccctgaatggcgtggtctcttcctatctggcttgttgccaccttgccacactaccctttgacatcacactccagcttcatcggcatttctggcagttctttttctactggtgtgtcttctgcctggacaactcttcagactctcaataaaaatacttcttggccaggtgcgatggctcacacctgtaattccaacactttgggaggccgaggcggatggatcacctgaggtcaggagttcgagaccagcctggccaacatggtgaaactccgtctctagtaaaaatacaaaaattagccgggcgtggtggcacacacctgtagtcccagatactctggaggctgagtcaggagaatggcgtgaacccggcaggcggaggttgcagtgagccaagatggcgccactgcactccagcctgggtgagagagcgagactccgtctcaaaaacatacaaacaaaaaatacttctcatttctccaatttcagcttaattatcccctgtttggtgtggccctacttggcttccctatttaaagggaagtccatttactgccctacaatcacttcttaccagtgtcccttgttcatttccttcatggtacttagctcaatttataattttttattttgtttacctgattattgcttgactccccacctaatcaccgaacatagaatagacacacacacacacaccagaatgtgagtttcatgagtacagagatcccatggtcttattatttattttataccaattccttaaaagagtgtttagggccaggcactgtggctcacacctgtaattccagcactttgggaggccaaggcgggcagatcagaggtcaggagatcgagaccatcctggctaacacggtgaaaccccgtctctactaaaaatacaaaaaaatagccgggcgtggtggcgggtgcctgtagtcccagctactcaggaggctgaggcaggagaatgcctgggagatggagcttgcagtgagccgagatctcgccactgcactctagcctgggcaacaaagcaagaccccatctcaaaaaaaaaaaaaaaaaaaaaaaagagtgtttggttgtttggtacataaaataaatagtatttgactaaataacaaaatccatctctcactatgtccagaactatatttcttaaagtctttgctaatttttatgagaggaaaatggcatgttattattttaatttgcctctgtgattactcatggcattggacatttaaatatgtttattggctatacataatttgtcaggcaatttcacatactgtactttgcctagttttctgttgggaatttttttatttatttgtgttatttgtataatcagaggaataatattataatcaacttgtgtattaaaaatgtctccactttgctctttggctttcaatatgttgtgatttctttgggtacccaatgctctccttttacggcatgaaggctgttcagtgtttttccagtggaagttattaatcatacttcatcagtgaataatctgagactaagagaaaaaaaaccttacaaatgactcatgtttggtagaatctgtctaactctaaaatgcatattcttttcactctatgtgtcaactgacttccatacagttggagaagcaccttatctcaacatttggcaacagatagttgtcttagtcaatttgagcttctattccaaaaataccatagactaagtggcagaaattggtttctcacagttttagaggctggaaagtccaagatcaaggtgctggccagtttggttcttggtgagggctgtcttcctgatttgaagatggatgcctccttgctgtgtctcacatgtgcagagagagatcatctctctcatgtctcttcttataaaggtgctaatcccatgcatgagggtttcaccttcatttcctaattaccttccaaaagctccacctccaaatatcatcacatgggggattaaggcttcaacatatgaatttggggtgacataaacatttagtccatagcagatagttaagtaaatctatatttctatgcatatgtttaagggaggaaataagtttcattgctttattgtcatattcacatgaatatgtcatgaatatcatctaacaaaagggatccagggatcctgagttttagaaagcctatcttgatggtttctaatggaaattgcttatttgcctgcattaagtttgtgccagccaactgaaacttttatgtttctgagctttggaccaaacttttatcatttcagtgtggtgacagtgtatctcatattaatcagaaactctaattgatcagaaactctaattgatatgagttctaatcagaactcatagttccatatgcctttggttaatacaaatgggaaaaggcattattttctaattacctattaggtagacaaaaatattttctaacctagaatccatgaggggagaagataacaatattactctttgcacaaaaaattttaagtcattatctaggaccatctttattcccatctgactgtacaaagtattggccgttaagagaatgaaggactttaaaatgactgtttatcatttttaatttattagaagtcagttaattattacatactgaaccacaagcttatttaatactagaagatgagttaataataaactgctccatttcatcgagagtgatggaccaatacagttaccaatgaagcagaaccaagggagaaagacatgaggtacagtgacaaagaagtgggagagagttgtaatacaatattttcaattgtggaatcaagtgcacatttaaatatttttgtgctattgctaaaggaaatgctatttttgattaagttattaaagtcattaaatttaattttttattctttaactaaattattttatattaatctgtggtttggtcaagttgtctttggcctaccatcccacaagaagtcagtgacaatgttgggaccagaattcaggagtcatcagagtccattgttgtattcttataaccatacttcactatctcagaggatgatttgatttgtaattaccacaattacacatgcaatctatcttctgctggccacttctgtgtatgcggccattgcacagggatattgttaaaataaattgcataacacatgtagggatacatgcagagataaatgatttctgtaagcccagaaaagatataaagagccatgaaactttaaatgaaattcgtgtttctggagcagccaaatcaatcatgatccccagcaagaacatgctttgatcagcatcaatttttcttacagtcttacatacaatagtcatcttgaaatactgtcatttaaaaaattaatttccatagtgatttttatccttgttttggtgttatagcccctttatttattcaatttctgattaggctgattatatgcatttttttctctaatggacctccttagttgaacaggcaataatgccataatatgcgattaaatacaattatgactttcttctcaagggcttgaaatagtcacagtaaaaaataaatgctataaatgcaaagtgccctggtagaattgtgcttatagagggaaacagcacaaaatgtcagataaatgatgaggctcagaaaggatccttataacattttgttaactttctgtcagttttcattttacataacaagataaactaaaaaacaacaatacgagaacaattttgggtcaatacgaagtgaaacagaagaacattttgtctttccagattggtttatctcatcactaaagtagcatagacttagcgattaaatagtataatgctgatgaaaataggagctaaaacaaagacatggaagtagtccatggtttggtacataaagtgtgtttctgtcatttgttctttgcaatatttaattcagtcacaatctcagtgatttccttgagcttttggatcacagaaatgagaatgctgctgttcctccactgcagggctctggacccctcgttgtttacctgaagataagcttcatctctcagttaatggcaaaattatattctgacctccaatctagtgcttttgttaactcagcattatttagaaaagtctaaggacaagtgtcagtctggaccctggtgtggctgctatgtgaaattcagtttatctgaaggctcattgaaattcattttgtgcataaacaaaaaactaccaggttccccccacccccaattcatttgatcaccagatctgaaagtattgaataaatccgtaaaacctagtgcagtgtctaattctgaagacacttcaaaatattagtcttggggcaattctgggtactgtgagagaaacagaaaaatcagaagatgtatttcttccttcaggtactttaccatctacttggagtgccaaagcagcagaacaactagagaataaaagctatgtgtgtattgtgtaaccagcttatgtactatataacccacaaccaacatccaacctgcaattacagctagggtttctaacttttctctaaaataacccaaaacatttttactcctcttcttcttcattattctgaaaattgagcaatataaaatttttaaaaagaaggggaaaatgaaaactagaaaggaaaagcatacagatgactatttcttcaaatttttctctgatctttgtgtgagagacttgaaacgaattgtttatttatcaagctcattcactttaccttcctagcaatttcaaagttgactgctcctacaagatgaggaaattaaatgatgagagagaagtaggcactgatgggatgggatgagggatttgatgataaggactgatttgatctccttaaaatcctagactctagcccaagattattgtcttaagtattctcttctgttatcatccaattcagtctctaggattgagatactattgttctaagaaagaatgtatattttatatctactatatgaatctttccctccttcagatatgcctggatgcttctctgtgggggtgggtgatttttaaagatgttagtcattattggtctctactagaatcacctgttctttttttttattatgccacattggaaaaagaaagataaattcagtcatttttcctttatactctatggaaggctgcattatcaagtatctctccccaaataagatcaatcatatcctgttttgataaactggccatagtgttactttaccttctttctttatgtcgtgttgagaaagttttttaacctcaagggaagtcaaagtttttgttttcgttgttgttgttgttgttgtttgagacagagtctcactttgtcgcccaggctggtgtgcagtggcatgatctccctcactgcaaactccgcctcctgggttcaagtcatccttctgcttcagcctcctgagtagctgggactacaggcgcccaccaccacgcttggctaatttttgtatttttagtagagacagggtttcaccatgttggccaggctggtcttgaactcctgacctcaagtgatctgcccgccttgccctcccaaagtgctgggattacaggcgtgagccaccgtgccctgccagaagtcaaagtttctgtgtcaatgttttcacaaacattatctctgaggtgtggaaatatgtcttatttcccattttaaaagtgatatataacaccgttagcttctcttagcctcggtatctttaaccgtaaaatgaagtatagatataaacatttgtccaatctctccaactagattataaacctcaagagataatgaataataaataatgccactttgtatctctagtacttaacagagtgcctactgactagtagatgctcaataaaagttgagaataattatatttccatttcttcactttcttgaataaggtggatttctgtattatcctataattattatgtttaaaataatatattattttatagtaataactaagtcagatgatctaagttaaaactttcatcggaatctaagaagagaagaatttgatggaagtcagccaacaaatattatgctgcgtcaaaacagtgtagctgtctctcactgtgccaatttattttacccaaggtgttgcaactttgagatacctgacaaaaaaagaggctcaaaggtattgccagtctacatagaccatcatatgttggtcccgtctgctgagaaacgtgggtttatgtggaagtttttcctgacacttagaaaacagcataagccaagataaaatttgctttcatttgtcaatgcaacatcaattcttctacaagcagtagactggagttttaaagtagtgacaacccacaggacgtattcttccatcgtcttatatataacaagctgtttctctccctgtctattaggctattcttacattgctataaagaaatgcctgatactggataattcataaagaaaagaactttaatgggttcctggttctgtagattgtacaggaagtagggcactgtcatctgcttctggggaggccttgggaagcttttacaatcatggtagaaggggaagcagaagcttacatgtcacttggcgagagcaggtgcaagtgagtgcaaggagaaggtgctacacacttttaaatgaccagatctcacaagaactcactcactatctcaaggacagtaccaagggggagggtgctaaacccttcatgagaaatctacccccatgacccaatcacctcgcaccaggcgctatctccagcattggggattacatttcaatatgagtggggatatatgatttggatgggaacacagatgcaaactatgtcaccgtgttaccctcccagtagggacctctagatttaacaaccttagggcaagggagtaggagagcctcatggtaatgattcctgcctgattaaggtataacaaagagttattagttaaagaaaaatgaaaaaaagagagacagacaaacagaaagcaggaataaaaagttttataaatgcaagaaaaaatgtttgcatgaaatgacacaagaagtatcaaatgaataaacacaatttatgaaacgtgcatgtcatagttaattttatatgtcaacttgacttggccatggatgctcagatacctgattaaatattgtttctaggagtgcctgtgaggatgtttccaggagagataagtattggaattgatggaccaagtaaagcaggtggcatactccaatatggatgggcatgattcaatccattgagggctcgaatagagcaaaaagacagaagaatgctgggttcacctgctctctgctggactacttgggttgggacatctatcttcttctgcctttgatgcttctggttctcaggccttgagatttagcctggaatctacaccattgaccctctagctttcaggcctttaaacttcacttgaccttcctgcatgtccagattgcagacagcagattctgggatttcttagcctccataatcatgtgagccaatatgtgataataaatttctttaaaaatatggattagtaaaatttgcatcctaatgaaaatgtaagcattgtgacagagaatgctttagtcagtctcaaatcctaaatttgagattgaaatttaagatagcttaggatgaggaaaccacagtgtccttattgaaggagtgacttactgacttctacatccaatacagctccttatatttgacaataaaattgaaacaataatagtttaaatcttggcacatagaaattatatgtccctgacctactaattttctgtaatcaggatgctagacaattaacttcctaaagaaaacacatggacaattatgcaatgtttttgataatgaagcaatgttagctcactaaatgaagtaaaatctgaggaagctatgagaagtatgaagttgattattatgaaaaagaagtttgagctgtatcttaaagataatgaatgctccttaggtcagtcagtaagttttaaaattacttaactgaaaaaattaagagaatgtttgataatttaacatgtatctttacttccagagtaaattaattatccagatttttatcccactgctctctaaattgttctattcaggcaactatatatggtcaaagttgtatttgcctgtttttctccatgtttgcttccattgtctacacaaaaaacttaggctattattttatgtgaaaataaaaaatagggagttacatgcagttctttttccgctgaccaaagaaagttttcttcagaaagagcagtcccattttttacttatttaaagaatccacattctttgttcttcctggacatatgccttttgcttagaatgggaacagaaaaggtgagactgcctctagagaagctgaaagcaaagtagtgggtctgtaagatctcaacataatcaacagtagctgtgtattcgtagctgtgatacagaatgctgtcatacgtctcactaccactccaaagctttaccatgctgcttagcacattgaagcttcatctcagatcttgccggacttatttgatatttaagatggagagtctaaaggacaaaactaaatacttccatgatgtttaaattgggcgacagaaatacaacctacttagaaagtggtgtcatgttattccatttttcaagagtttaatcctcacattggttatttgctacgaagactcaaggcatcatttcacttgacttagcctagccctatcacagtgatggcaaaataagttatattagcccagcagcatgcatcagacagtctgaaaacattctaaatgattaccactgaataagagaaaagagagccatcaagcctcattgagagaggcatgtccagtcatctaccaagatcatttaccaccctgttcattgttttactcagcagacaccctcacgcagctctcttcagaccctgtgtcagcgaaattacaaaatgtccttgggatcattcacacgcagttgaaactatgaatctttaatctggaaatgccaaattttctgggaagaaaagcatttgaaaaaatgccttacaatgtcattatttcctgccctaagggctactcctccttttgaaaaccaatttttagaaattagacatttttcaatactttgtaagtccttaaaccaatgtacgatgtcagctgcaatattttatgtgtttcaagacaaataaaattcttttttattaacagttatatgtctggcccttaaaatgctgtaaaataaaatgcttcactgtgtgaaaggctatcatggggtcattggataagttaccaaacatatttttcctgtttttaggacattttaagtttagcttttgctgctgttgaaataaagaaaacccttaattaacatttctgcaacttctcatttttttgtcatcctctgtataactagttgagtcattacatgagggtaactctaataaacaaatctagtaattgttctggataacattttattttgtatcttcttataaatgaatatttgatgatctttacattctgcagaaagatttacactttcaaatgctagccattaattagtgaaagcagtacaacattttataaaacacatttagtatttattttttaaaacattccagtgtatagaggctttttgttgttgttgttttgtttttgtttttgtttttgttttttgagatggactctcactctgtctccaaggctggagtgcagtgacgcaatctcgtctcactacaaacttcacctcccgggttcaagttattctcctgcctcagcctcccaagtagacaggattacaggcatgcacaccatgcccagctaatttttgtatttttagtagagatggggtttccccatgttggccaggctggtctcgacctcctgacctgaggtgatccacccgcctcagcctcccaaagtgttgggatcacaggcgtgagccaccatgcccggccttgtttttgtttttttgagacagggtctcgctctgtcacccaggctggaatgcagtggcaccatcttggctcactgcaacctctgccccccaggttcaagcaattcttgtgcctcagcctcccaagcagctgggactacaggcgcctgccaccacgcccagctaatttttttgtgtgtattttttatagatatggggtttcaccatgttgctcaggctggtctcaaactcctggcctcaaatgaacccacccacctgggtttctcaaagcgctgggattataggcttgaacctggcctgattaaagattcttgatacaattaatgattgggtgtgatttatgtagtgaatgattatatgctttaaataagaatacattcatagatttttaaatcacactttaagatcaaaaaaagattttaagatattttaaaagatggaggccaggcacggtggctcactcctgtaatcccagcacttcaggtggccaaggtaggtggaccatttgaagtcaggagctcaagaccagcctagcaaagatgataaaaccctgtctctactaaaaatacgaaaattagccaggcatggtagcgcacacctgtagtcccagctacttgggagactgaggcaggagaattacttgagcctgagaggcggaggttgcagcgagccaagatcgtgctacggcgctccagcctgggcaacagaccaagactctatctcaataaaaacaaataaataaataaataaaaataaaagattgagacttttttaaggggtgaaaatatttcatttgagcaaagcattcctcagctaaaaaaaacaagttttaaaatttctgatttaggaaccagtaatatattgaaaactgaagtttaagtgtcaatatgctaaataaatatttccatttccctaagtacaaatcataaattgcgaagtaactagaaaggaaactattgatcttcagcttatctgcctttgtgcagatatttatccggttcaatatttgactaacttgtctaaccgtaagaaccttgttaaaatactgatacccagaagtaatttaacatgtcacgacatacgtttagaaaggtctcctgtttgcgttagaggagtgttcttcaactttgaatcacatatgaacaacgttcataacatttaaggggtcttgttaaaatgcagatttcgatttatgtattacaagtttctgggtgatactaacactgctgttctgcagaccacatcttgagtagcaaagcattccagaagcattcaagatcccagaacaggacacctcatctagcaggtcctccacaaatgtttattagtcaatcagaatctagctaggtgcagtggcactaaacgtctttttttcttttctccttttttctcccttgccctagcttaaagctgtgcatagaagttattttattttatcctggtaaattgagcacttctgtttgttttatagaggtgtgccctttctgttgagtatctttctaagagccattatggtgtgactcatctttctgacagtatttattttaaattttaatttattcagctgcttcaatcacattcataagttatcttttagaataccttctctccttcacacttaccttggccagaaacctgatcatctgaatacttgtaagagaaccaagaaagtatagactaattgtttattttaaaaagcacaatgaaggaagaaatggatgtgatttttttcttggaaacgggaatttaatcacctaatagagtctcttagaaaagtaccattcccaaatctgttcttgattttgaatactaaattgctctaaatccacctaatggttgtttaaacctatgacaccatggagaatgtgagaacaataccgtctatgaacctcttcaagaataagctcaaaaatgaactccaccaattgatgtggaaagtatttcatgcatgggacgttctaaccagggaaatgggaaagagctggcatagcaaaggtggaggggctaaggaagaacactgagagatgggacagagatggcttgccaattcacgcgtcacatgagaacaccaaaagattttggaaaatccataaataacctaaattctcttttttcctggcccgtccagctacctcccccccaaaaaaagaagccctaaacagcctctttgctatgtctcagctaatcagcttatcagcagctcacataagaaaaggtaaataatattcgctatttcaaattgttcctctctccacttttccttacataaatcagggatttgttaggtgaaatgaattttttttttttttttgagatggagtctcgctctgtcgcccaggctggagtgcagtggtgcagtcttggctcactgcaagctccgcctcccaggttcacgccattctcctgcctcagcctcccgagtagctgggactacaggcacctgccaccacacccggctaattttttgtatttttagtagagacggggtttcactcatgttagccaggatggtctcgatctcccgaccttgtgatccgcccaccctggcctcccaaagtgctgggattacaggcgtgagccactgtgcccggcctatgtgaaatgaatttattacacactccattgattgtataagtaaaatagcctggtaaaaattagctgcatgtctttttatcattctttgaaaaacgagaagtgtttagtttgaagtatctaagtaatgacaaccagcctgaactattaaaaggatgtcaggaagaagagagcaaacatgtcctttttgctacagaatgccaaaattataatcaacaggtaacaatcgcaaggataaaccttgtttgcctaacaagataaaggactttcttaaaatcagaattccaataaagtctctcatttaaattcaggggttagataacttagaatgggacaaatagcacttatattttaatctctaatttatttgtctgtctgcaccacttgaggccaggaactatttcttattcattcttgcctcttctgcacctaggagagtgtctagctcatattcattaaataaattttgttgagcagtactgaaaggcacagatttaagactttggaacctttcccaatactatgcccttgtcgtgttgaatgaacgaatgaatcatgagtttcaagcctaatgtttcccacatgtcatgattaatggtcaaactaaatcttggttcctctttctctctctctctctctttcttttttttttttgagacagagtctcgctctgtcgcccaggctggagtgcagtggcacaatctcggctcactgcaaggtctgactcctgggttcacaccattctcctgcctcagcctcccgagtagctgggactacaggcgcccaccaccatgcctggctaattttttatatttttagtagagacggggtttcaccatgttagccaggatggtctcgatctcctgacctcatgatctgcctgcctcggcctcccaaagtgctgggattacaggcatgagccaccgcgcccagccggttcctctctcttaattcagtttcccagggtctttactgacagccctctgttaagaactgagcagtttcttgtatcctatcagtggttttgccacttccttctttttttttttttttccccaccaacatgctcctctctttctctaagtgaagttgtgcagttttttttctctaagctataaacaactacacttgggatcccaggccttcccttcattacccttatgaatatgcctttgtgtcagtggttggccagagacaaatagtaataatagaaaatcaatatactgtatggggagaagtggaaaagtgcctggatataagttttacattaaggttcggtctatacacaatcatattgattagatgtaattgatagattatcttagtattattcacatgacattatttgtgccttcctgagaggattctaccctcccatgattcgtggaactatctaaacaacttcctaggaatgatcctctcctttactcctacacagtccaactacatgcaaaggtgcccggcacatggttaaaaaacaatactacctgtgcaaatacagacgctactcagcttataatggacatacagcctgataaacccatcataagtcaaaaaatacatttaataccctgataagcccatcataaagtcacaaaagcataagtagaaccattgtaagtcaggaaccgtctgtataaggtatcaagacaaataaaagtgaataccacacatactacttgtgaacttttaataactctgaacacaaacagcttgaaaacaataattggatagatggtctttaattcatgtctttatgaaaatagcaaaagagtatattgagaatgattgaatcaaatttaacaaaaccttgcttctcagtgtgactcctcgaccatcagcattgaaatcacctagaagcttactagaaatgtagaaactggggcccaccccagacttactaaatcagaatctgcatttttaacaaggtccccaagaaaatcagtacacgcattatgtttaagaagctactctaatgagtacgcattaagtattgatcacactccagttccttcttagaaaagaactgacggcacggcttaaccagtgtgactaaaggaatgatctcagtgttggtctgtcctaaattttcctttgtgtctaccctgaactgagattcgccagggcctttaatactaggatttagtcttcctttatgcatgcactcaaattagagcctttgtcatctgagtctttacagatgatatctctcaacagtgctgggagtgtggcctaaagcaatgtaatactaagtgaagtcagaaaactggctacccatctgcaaattgtttgttacttgtctgtcataatatagcaactttggtagaatatgcatgatgacataagaagcttgtgccaaaatgtaaatcacctacatcactaggcacactcttaatttcagctgctatttttttcttagtaaaactttttcaatgaaggaagtagcatgttgatttctactcaagcatagcttgttacctccttgtggacaagaactttgaatagcacaggcaaagtgattaaatgcagaaggctgctctacttgctgcagtgtgaatgtggttaatcacaacaggccctacatattagagcacaaattaattatggctatagattaactgctttgttaactccataatttctctggggttcacagctagattcccagtacctggcacagagatggccttcagtgtctgttgagtgaatgaagtgcctagctcaactctcattgtttacctgttgttgtagttgtttcttctggcttggatttctaaagctcctgaggtatagatactgttgattttacctaaagaggcttcagcagaagagaacaatcacacaagaactagaaaagacaaggaaggttttatgaggaaaatgaacattaatctagaatttgaaggaaaaatgggacccacatcagcatcatagagaaaaggggattcctggcaaggagaacatggaattttgtggaatgcacagaatgtaggaggtaggaatacatatggcatttcaaggaatgagtgtgccatacgtcagccaaaggctgaggcaatggagtactgggaggaagtgttaagaattatggatggaccagattcttactttaacatcttttttttcccctaagcctaatgtgcttccaaacttgcctcttttattaaatgatattcataacaaaagcaatactaaagtccttccttgcctgtttcctctacacacataaaaattaaacatttaaataaaagtagaaaaattgtgacacttttttaaagcttcaagagtaagatttcacatacagatgacacattttctacaatgtaaaatttagagcattactaacgcatattaaatgctagatcagtctttcaagttacagtacacagaagataaaaataggtgcgatttggaaagaacaaaggtgaactcgaagcatacagtgaataggcacaaatcagctacaaattttagcagatattcatgcgcttattgaaataagccaccttttcctgcatttgtgccgacaagtccatttatcctttttaagatgctccagtaacgataggagcattttgggggcgggggaggggggctaattgatgtgatctaatttttcagactcaggagttttggagaaaggtcagtgtaacagaaaagctgcccattagaaataacatctataaactgtcagaaaagagtgcaagccagaagatgaagcaattcagattgcttcccttcttttccaaggttcttgggaaaaaaatttcattacgcataagaagtatagctaaatacttaactgaagttaaaacaaaatcatgttttctaacagttcaggtgaatttcaagccatccaggccacaagataatgatgtcctccaagtctgacctacagggaacttttcttctaattaataaacagactacagcaagaaaattaatttatgcaccgcatttacttgttgatgcccttcgagagcataacatttcagtaggcactgtgtacacgagatacagcagaagaatacgtcaaagctagttctttggtgttttttttttcccagagaaaatagaggtaatccaacattagacagaatttgtcgagattactagatgtacattcaaaacatccattcaacaaaccaattgaattagttgcatataagagtgtcccctctgggccgggtgcagtggctcacgcctgtaatcccagcactttgggaggctgaggtgggtggatcacgaggtcaggagatcgagacaatcgtggctgacacggtgaaaccccgtctctactaaaaatacaaaaaattagctgggcgcggtggcgggcgcccatagtcccagctactcgggaggctgaggcaggagaacggtgtgaaaccgggaggcggagcttgcagtgagcggagatcgcaccactgcactctagcctgggcgaaagagcgagactccgactcagaaaaaaaaaaaaaaaaaaaaaaagagtgtcccctctgaattgtactcttcaggattccctgggtgcctttttaaaatttaagtctgctactgcctctttcataacttatggggcagagccctaattccttagcatgtcatgagaacttccaaatccaggttctgcctgcttattcaatctggttccactctcatgccagccacttcatacctaatcctccaccattgctaccgccagtgtctgaatgcatctcacctgcgtgcattttaccaagattctcccactgcctggaatgagaccacacctttttcaccctgaaacacagccattccaattgtggaaactcaactcaggcacctgttccttcccgtcttaccacatttcctgaccaactcatgccaccattgaatggccccttaagcttaagtcctcttatttttgcagtgattagacgaaatactatatgtaaattatttagcaccatgtctgacagtagtaaataactatcattatatcacatgttattataactacactggagagacaatataacatggtggctaaatgagtaaaacttgacatcatactgcctatctttcagtacttattgttctgtgaatttgtcaagttaatgggccctcccttctgggtcagttttcttacctgcaaaatgggtacaataatagtttctacctcacggggcgtttgtaagagttgaatgagttagcacagaaaaagcacttagtgtctaccacatactaagtatgcaataaatgttaactgtgctgctgctgatgatgtactttttaaacactttaataaaaaatttcaaatatatgcaaaattagagacagtggtatgcatatactgaacacccagctttagcaattatcaaattttgccattattgtttatttatctatttctctttggtctatttttcattaatgtagtattttaaagcaaattccagacattatcatcagtttccctttaaatgcttctctaaacaatgatgactttctacatagaaccacagttccttttacatccctatcttgcaaatacgtctaaataggatatttcatttaacttacttattttcctatctttccttctgggctgtaaatccttgaaaccagtggttgtgatatttaattcatttaagctgtaattcactggctagaacacggtagtagtgcaataaatgtactttttaaagagagagagggaagtaaaaaagagagaagggagagagttaaggagagagggaataggaagggctcacataacaaaataagacattaaacaaatgttgaccttagaataggcatagtacaactagtgcctgaataagcagtaagtaccaaatgctgtgatcctagagaggtgtctcagaaacctatgcatagccaagtttaatttgccagcaggtttttacttcattgactggtcaggtagagaagaagaaagcaaaaataaaagagtgtattattctgtatcacaatggtatcagattgtttattttggagtctgtgtctatttctcatttccaataatttatgatatcatttaccattattaaaggaaccttatttttaaagccctgtgacacctagtgtgaagcagaagagtttgcaaagtttaaacatcatattgttaaattctggagtggctttaactagctgtgtgatcttgggcaagttacttgctttctctgcttcagttcttcatttttaaagtgtgacaggattagcacctatctcataggcatgacatgcttagaacaatacctgatacatgaaaagaatttttaaaattttatttattatctagttataagagaacaatgaaataaaacaaatatgaagctcgcccatttaaagaaaaaaaaaagaatgatttcattgaagatacttcctctgccatggaattgctaaatgaaactttgcagcaattccaaaataacttgccccagggagtaggattggattttgctaaactgaggatttaagatttacaattttttgactgtaattcattcttacctctgccaaatgtgattgcaaagggaaagaagacatcataattgtacgaaagggttttaaccaggttttcttgttttttgtttgtttgtttttactaattgtttcagggcatttgaggcaattgtaagagcttacacatggtaaccactacataaatattaaaatgatggcttggtacaaaaatgactttatgattaataaaatcacaaaaacttggaaaaagagttataaaaattctccataattgagtgccaactttgggcctaatgttttatatagtaggtagaacccaataactgccaattatttggcagttttgatgttagaaaaggccacgggataaagttcggacaaaatacattttttctattcctccagatagtagggttctcatttttcacagaggaaattagggtttagatagataggggacttgtataaaccacatgctacaaagcgaccatgtagaaacgtgagcccaggttttcaggctcatcttattagtggctaattccaatgtcctttgcatatttaggaaatgtttgctataataaagaagctgggcaataagatattaaatattttgaaaagggtaaatatttagtgatttatcaaaggaagcacaaagcactgagtactttagcagaagaaatggattaaagatgtgagacccatgtcacataaaccaaagaccatttctcctccagataataatgagattgtcacatctatcaatttctatgtatgtattccattgtacatcctctctccctaaattttaaaaagttatgatcatgttgatatgcaaagggaatttatgtgtttgtttaactttttgaggagaaagtgagaaagagaaaatattttacattccaggagagaagcactttagagaaattgaagcaaaaactgggaagaagtcagggccaactggtggaaagtcccccaggatgcaagagaggagcactgagccctgacctacttctcactaattgctgcaaacctcccataaattccttgcccttcctggtcttcagattcctcttctataaaacaagatggctggggaaagactctctgaggtttcttggagtttttacaatttaccgatcttgtgaaattagaccattaattatcttttaaatgtatgttttacaaagtgttaagatggaagaaataaactggtaaaatataagatggtttgtaatcataaatattttccatatttaattatagtttatttctcatagaagtgtaaattgaggtgggttacagtgttaaaacaatattagaccagtttgaaaaaaaaaagctagaaagttctatgcacttacatattttgtgataatcagatattagtcaccattctttatataaacccaatgttactaattacttaagctttaagatgaatgccaacattttgatttattcacatccataacataatttggagaacctagaaatttttttgtttttacatttgtgcaatgacatttcaggtttggttttagacttccttcttttctttcaacatgatgctgagaaacacaagtaataggataatcacaggttcattcctagccatcgcttttgcctgtcaatatcctaattacttccctactccacttagatgactcagagtccatgccatgaatactgatgatgagagatgatgcaatggggagaacttattgtagctccatcctgtcctttaactttcattgtttctccagccaagaatttaagggcacaagttagaggagagtctggtcatcaaaataaaattcgttagccttttaaaatatgtcaggctaataggacaagcagcctgcaaggagaagcatccctgactttgctggacagcatttccaattatcagcatcttctggcattttaagttataactgaatattctcaaataaatgttgcaagaatatgaagtgtagcataagtattatcttttcagtgaaatctattcttatttatttacatagagtgtattctattttaaattatatatttatggacataaaattcacatatttgacaagttttttgaagaggcttttccactggagtaaaaagatggaaatttttaaacagcatttgattggtattccattttcctttaatatttgaaaatgttatgttgatcatattttaggtaggaatggatctattaactaccatggaatcaatttgtagttatccatgaaaataaaacaggaagaatttttaaataaatattcactctttatttacaaagatttattaagtctctgctatgtgccagtcctagagaaataaactagtgatggcctggatcgtttaggagcttacaatgttttgggagacatgcacatagaatgattaaacgaatcaggagatggtgagttccacagctgatgtatacacaaacaaataatgggtgcatgaaagagggtcaccttatctcttctgataaggttatgaaggtatcccagaagaaaaacatctgagctgagtcttaaaaatgcaagagaatattcccagatgaagaaaggggagcaggccatctcaagcagaggagacatcagttgattttcagcaagtatgtagagtgtttaaggactgattgacaggtcaacgtggcccaagtgaaaatggtgaaagttagttggacccaactgtgcaggtcgtgaagtcagattgtgaggatggctcccatctcatctgggagaaagagatggcttcctcaggcatcaagtgctttcttcttaaagctgcagttatttcaccgctatttaaatttgtgttttcccgatggtcagagactacagtcagactgcctcttggatttcagtgatctttgatttacctgtttacacctttcacatatttgttgttgtttgcattttgacttgtagaagctctttacaaacatgagtagtcatcctttgtcatttttgttgtgctcatactcccacggtactttgctagttttgttattttgtctatgattttaccccatacacaaggtttattttataagtttagctaacaaatacttattatgtaccaagttttattctaatgtttttttacaaatgttaacacatttaatcttcataacaatcctatggggaaggtattaacatgcctatgttacaggtaagaaaactgagctacatcttgaaggtcacataacttcccaaggccttactgtggtaggtgtgaggccagggaatgctacaaagccctgctttgagcctccactaagctgctttctttcaaatttgtcttctgttcctttatgatacctgtattttatatcttattaaacaaggccttgcccagctcagattataaaataacctcctagacattcttataattttatacttctgtgacttttgggtttagaactttaatcaatctgcaatgtattcttgtgcatgatttgagttagaaaccttctcaaatgttacattatttattgcagtaaccactgtttctctcatttatttgaaatgataaattattgcaaaatagattcatgcattttttgtaacttttttattatatttcactgttcaatttgttcattccttcactaataccatacattgctctaattactgttactttttagcattgaaattgatgtttaagtgttccctttttaaaatatacttgtcactgttctcatttatttataaattcctccaaataaatatatacaattagtgtcttacattttataaagttggtttgttttggtggagtagattaaatattgacttgggatgcaatatacttataaaattaatttgaagaaaactgatattgtcaaaataattaactttttcatactagaatatagggtgtcttttcatttattaaggtctttcttgtatttcactacatttttagtttttttcttaagtcttacacaatgtttggtaagcttatttctaagtattttatcattgttttccacttttaatgagatttcaaattccattaaaatttttaattggatcctgctgatatacagaaaaactattaatgtttgcatgtctttcatgtatataattgctatattaaattatcttattaattctagtagtttttcaattagttatcttggaatttttcttagtcatatccgtgaaaattgttagctttatctcttcttttgcaatgtttacactttttaattatattgtctcattgtggatatgtacttataatgaaaactattcgtgataatattcttaattttctagttcctggttttaattgaaattctttgtatatttcaccagttagattgttcttacacagtagtttgatttttattcctagactagttattccattctcacatttaaatgacactttcgctgctttaggttctcaatcttttgtctcagaactttctagcatcttgtgtttcagggaaggctgaggccaatctgagagttattccattgtgctaccttccttggttttaaaaattatcttcattcttgaaattcaaagattttacccaaatttcacctaaatgtgtatagatttggagttaagttttccagagaaaataccagacactcagttaaattaaagttcagataaataacaaataaaaactatttcccagctgtatgcatttttatttgctcaatctgataatcctaatggggtattgactgttaatatattattatcattattaattatttttgttactgtttggcagtcaaagggatattttaaaataaagtcctttttcagatcagaccaatatttttcaattacttctttgacacagcgtagcaggtcagaaaactggttcttaaaaccattgtgtatattggatgtggtcttacatttaactcccggacaagctgtttataatttggtagtatgtcttaggctcttagatgctcacatgctagaataagacaaaaagaattaggccattcctttttctctttattccctgttctttctatctggaaaaacagatattggaaattcttcatctattccctatgtctcataacttttctattaaatgtatatatttttgtcttttatgcctcatgttttgggagtttatcttcacccacattaattttaatatgtatgcctgatgaatttattaaaaatttctacttttaatgagattgcaaattccaataaaatttctaattgtatcttgctgatatatagaaaaactattaatgtttgcatgtctgtcttgtatataattgctatattaaattattttattaattctagtggttttttaattagttttcttgggaatttttcttagtcatatctatgaaaactgataattttatctcttcttttgcaaagtttatacattttaattatattgtctcattatggatatgtacttataaaacaatttgtgataatattcttaattttaaattaagaatctttttaatatcttaaccttacatgtataaatttattaggtctgataattttattattagaccttcactaaaatgttaaagtttagctatcatggttttaatttcaaaattttttttcttgatcttaggttatttctttttcatagcaatttgttcttgctttatgacttttgagtttttttctgttttagcattatcatggtttcctctaagactgatcaactttctccttttacataagcatatttgttgattttcctcaaatatctggtgaaacttgatttccattcttatgttattaatatttataaatgaagtatcggtttatcaatgtaggtaactacagtggttttaacaattgttatgaaaggctggttttgcagcaggcttcttccctgactaggagagagaaatgtgtgggtctggttttccttttcttgttatgcaagcaggaagaaccagaaaagcaggggcactctcatgattgcaaaagcaagtgctcatctgggtggtacttttaagtgctttggcaaaggatgaggtaaaattcaaagacaacagcatcactgttttcagaacttcattcagagccattacgacaaataatttggttgcaagggtgtttgatacctgaaataacataaggattcttagcactctcgttgtctgttcacaattgtctgcaaaaagcaaggcaaagcatagaggtcatgcatggtgttatttttcatttgtgggaggagaatacatgttcttattttgatattaaaattaggaaagactagtggtcaaaattgaaagtatagagctttactgtgacataattcagtttcttataaggggatcatatataagagtaccccaaagtactttgtattgtgcttgcaacttttctgtaagttaaaattatttaataaaaaaggatttttttataatcaagaaatctaaagatggaaaattatgattagatttaggtttaacttaaagtgacagaaaacacaaaatattactgtttcaaataagatagaatttatatcttgcctacataatgtaagcggtcatccaagcctggaatggtgctccttggtgtcaggaacttgagttcattctgtcttgcagcctctccatgcaggaattccatgttcagggtcatcccgtggtctaagacaaatgctggaatttcagcatttccattcacattccagccagcaggaaggagaagatgattgccaaaaaagtgcactcctttcctctaggaacactttctaaaagttttactttcttcctgcatcccagtgtctaggaactggtcacataaccatatctagctacaaggaaaactaataaatacaaaagctgctaattacttctcagcattcctgtacctactaaaaatcataattattgtagaaattggatattgaagacaacgaagaaaacaatgaagagtatttgccacaccgtttgaacagggcagtgtttgtagaatctcttgaagctcatccattccaaagacatccgtgagtgcttaccatgcacgaagcactgtgctggggcttgagatagaaatgttgagaacaacacacttggtctctgtgctaatggagttttaggctaatgggaaaagtggggattcaaaacataaggaaacatatttgaatattaataaaagctaagagactgttaagagggaaattatcacatgttctgagaatgtgtcacggaaggactttgccaagccagggcaggatgatgatgatctaagaaggctttcctgagggcatgatacatgtgttcaaatccacaggatgaatgggaatatgcaaaggagaggctagagtaggaatatcaaagaaggcagcatatgcacaaatgtcacagggaaaagaataataatccagttaagaaactgaaagttctttatggctggagtacagcaaacaaggaggaaaacaggagaaaatgagactagaaaggttctcaaggttaaaataatgtagaatcaaatgcaggccacatacagttatttgtgtcattaaagggttagaggcagagagcaacatgacctgttttatacattgaaaaatgttctgaatgcaatgtagaaaacaactggatgagtgtaagaggagactatgctaggagttcaggcaaggtgggagagagagcaatgtggacagaatcaagagatattcaagagattaaaaacaatagaacctgatgataatttagatacgaaagagtgaaggtaagagaggagttgaaggtgattcccacatttccagattgtacaaatggatgggtggtggaccatttattttctgaaacagagaaatatcaactaccaattagaggaaagatgttgatttttggtttgatttaagagccttgagtttgcggtgcctttctgacgttcaagtaggcatttcagataggaagttaaacatgcaaatctggaacaccgagaaaatagcaagcctagagatacagatttgagaggtttttgcacataggtagttggtaactaaatcacagtttcagagaggagtccctacagagatagcaggcagagagatgagaaaaaacaagaatctgggacttgaatctaaaaggcaggcagaagaagggtggcagaaggcagcaatggagactgaggagggtgggtgagaaggtagggatctgttgggagtttgtactatgatagaagccgagggattctaaagcactaaacaggcaaattcctccttgacttgacttgacttccttccttaagtcaaggaagaggagggctgaaagaaaaaattgagagtacagaagggttctgaaatgttactgcaaagataagatgtgacaagtatctcttaaagatggtggtagtcatgatggtggtggctgtgtctgtgtatctttgttatgcatcaatatttgaaccacttggggagatgtccgtcaaagaatacaaaatttcagtttggcaggaggaataagttcaagagatctattgtacatcatggatgcttagtaacaatatattatacacttgaaaaatttctaagagtagatcctaagtgttcccaccacacacacaaaaagtgtgtgaggtaatgcaatgttaattagcttgatttaaccattccacaatatacacatatatcaaaaaattatgttgtacggtataaatatatacaattttgtcaattaaaagtaaatgaatgaatgaatgaattaaaatatttggagcactctgaagctgaattcagaaataatgctaaagaagacttgactttgttaaagacagaatttttatagaatatatggaaatagtaattattgcttaaaaactgtattcaatattttgatattgacctcaataaaaaaatgtgtaatcaatttttgaacttctagtcactcaggggacagaatggttaccatttgttgtcctaaagcaagggtagcataggggcttgtcccaggaacaatcagttggtcttcaaccaaaaaagtggatatttccatcagggacatttgcctggacaccaccatgttagattctaaaaatcaaacatgtgtcccaccctaactttgcctttagtccctgaaagaatggacgtaggtttgagagaggagaacagtgagggtcatccctcttcatctcaggagcaattaactagttattttgctcactttgggaagaatttgccttcaaaaattataccttttggaaaactataccatataattatttatcttccttcaaaatatgaattatttgatctttttctcacttcaacttttcaaaaatttcacataaggagccctattcaattatctccttctgtaattaaaacattttagtaggtgtgcaaccaaattgccaaactaagacagatcttgttattttaaaagaacattataatttcaattattctaataattgttattattcgatagagcaaattatgaatgcaattttcaaagcaaatgaaaacataagaaattcatgatttttctatactgctacaaatttggataacttcaaagtgattatcttacatttggcttttactttggaaaatattaatattagaaaaactgcaaaattttggaatctagattaaagaacgatagattatgatgataactgtttatgattcttattttattatttcttttttgaacctgcttttccaatctagataagcatgtctagtctcataccatattcatactgcatattataacatggtgttaataatcttaagtaatattccatggccaatcaaccttttttggacactaatactcattatgagactgagcttaacagctgttttttgtttttgtttttgcttttttagcatttaagtttaggggtatgtgtgcaggttggttatataaatacactcatgtcatgggggtttattgtacagattatttcatcatccaggtattataatcctagtacccatttgttatttttcctgatcctcttcctcctctcacccaccaccctgatgtagggcccagtgtccattgttcccctctatgtgtccatgtgttctcataatttagcccccacttgtaagtgagaacatgcagtatttggttttccattcctgcaatagtttgctaaggataatggcctccagctccatgcatgtccctgcaaaggacatgattgcattattttttactgctgcatagtattctatgatgtatatataacgcattttctttatccagtctactgctgatgggcatttaggttgattgtatgtctttgctactgtcaatagtgctgcaatgaatatatatgtgcatgtgtcttcatgatagaacaatttatattcctttgggtatatacccagtaatgggattgtggagtcaagtggtagttctattttcagctgttttaggaattgccacagtgtcttccacaatgattgaattaatttacacccccaccatcaatgtataagtattcccttttctccgcaaccttgccagtatctgttattttgtgacttttgaatcatagccttctgactggtgtgagacggcatctcattgtggttttgatttgcatttctctaataatcagtgatgctgagcttttttcatatgcttgttggcctaatgcatgtcttctatagaaaagtgtttgctcatgttctttgcccagtttttaatgtggttgtttattttttgcttgtaaatttaagttccttataggtgctggatattagatctttgtcagatacacagtttgcaaaattttcctcccattctgtaggttgtcagtttactctgttgatagttttcatttgtttgtttttgttgttgttgttgttgttattgtttttgctgtgcagacactctttagtttaattagatcccaattgttaatttttgcttttgtcacaattatttttgatgtcttcaccatgaaatctttgcctattccaatatccaggatggtactgcctaggttgtctttcagggtttttacagtttggggctttttttttttttttttttctgaggtggagtctcactctgtcgcccaggctggagtgcagtggtgccgatctcagctcactgcaacctctgcctcctgggttcaaacaattctcctgcctcagcctcctgagtagctggaactacaagtgtgtgccaccatgctcggctaactttttgtatttgtatttttttagtagagacagggtttcaccgtgttagccaggatggtcttgatctcctgacctcatgatccgcccgccttggcctcccaaagtgctgggattacaggcgacagccaccatgcccagccagttttaggctttacatttaagtctttaatccatcttgagttgatttttgtacacagtgaaggaaagggtccagtttcaatcttctgcatatggctagccagttattccaacaccatttattgaatagggagtcttttcctcattgcttgtttttgtcagctttgttgaagatcagatggatgtaggtgtgtgatgttatttctgggctctctattctgttcctttggtttacatatctgtttttgtaccaataccatgctgctttggttattgtagcctgcagtatagtttgaaattgggtagcgtgatgcctccagctttgttctttttgcttaggattgccttggctattcagactctttttttattctatatgaattttaaaatagtttttttctagttctgtgaaaaatgccgttggtagttagcagcttgtttttgtttgttcatttgtttttgaaacagaatgttggtctgtgccttaagtttgaaaatcctccaaaattttctgtcctttcactgaatatgtggtctcttggtcacaatgcagcactgaattccctgttaatatgcatatcttgggttctttttattcagtacacacagaggttgttcccttgaaaatgagtagtccagtaaaatgccctttgcagagttatatcccatatttctagaaataaattctaccaaatattagcactactgaataacacttttaacaatgtttaaacttgcctttttagttgaaagcaaacataaactcagctgtaatatcttaagttcaaatgcactaattttcaatttcatatcaaatttcaaaatacttttaggtttctattcaacactttggttttcatacacaagccacagagtatactaaaactcatttgggtggcatgtttctcatataagtaaaggtaaagactaaggacaagtaagttctttattttctaccagggtgaatggtaaagtagtaaagatcagtatttcctggaaaaggggaaaattgctttcagcaggagtttacaaatccacttggccattaaacatttttcacagatgacatcaaaagtgttattcacataaatgcatgggaatttttttccaatgtatgtaggtgttattatgttaaataaaacacagacccacttaaacatcatttaatttatggtaggcttttcaacaagctggccagatttggttgatgtttctcaaaaactactaaaatttcaataaagtgaatgtctgtgaagtgctttgaaatttaaaagagctgttgaatgtgtgcaaagatttagctatagggatgttcaatgaatcactgattatcacaaagaaaatgtggaacaacctaaatatgcaataataggagtttgattaaatacattatactatatccataataattttgcccttttggttgcaagaatcacagatacagtcagacaatttcagaataataggtgcttttgcaaagaagcattagcatctctgctgcagggcgtagtcctaactcctacccttctcctctcaaggtggtttattggtataatttttaaagacaccagtgccccctgtttttccctaacttagcagagaagatctgacaaacctattcagtcactatcatgtatgaagcatctctcatattcataaagtgtgggcaagaggctggtatagggtaatagactttcccaactataataggataagagtgattgtagctatcaaaaatatgacagatctttcaaaagtatgtgaaattattaatttaatgatgacccgtaagtcatgattttatactatttggcatagcttcacaaaacacaattttcatatgtattgaaaactaaagcaaaggaaaagtataaaaatttttgtgtaactgaactgacatgatatcagtcataaaatctctgcttgacaatctcatctgtcattctttcaaaaataacttatttattaatgtcaacagtgatgctgctttgcactgtattgaatataaatctgttgttcttttggcatttgggctaaggttggctaaattatcttagtaaataaattagcaaagcacctttttttttttctttttggcaatctctctctataattcctctttacctgtatcagtttttctcttttcctcatatttctcaaatatatatcaccattggttcttctttctcttgattgagaatttctgagaaatgttggtccatagtaaccagtattccaaggttagatgaaataaccaggacttagtgagaaatgattgttcagtaccatggatagcagaacacttatttccccaaatactaacacatactcctccaaattttagctgcaccattgaaaacatttctttcaacatgtctttggctcaggctattattttcaggccaagaagttctagtcagactagccaggctggctatactttttaaactatctgtggcaaaggatcaagatttttcccaccactcgatctaccgtgtaccaatatgttcatcatggaaactgaacaacctgctcctgaatgactactggatacataacgaaatgaaggcagaaataaagatgttctttgaaaccaacaagaacaaagacacaacataccagaatctttgggacacattcaaagcagtgtgtagagggaaatttatagcactacatgcccacaagagaaagcaggaaagatctaaaactgacaccctaacatcacaattaaaagaactagagaagcaagagcaaacacattcaaaagctagcagaaggcaagaaataactaagatcagagcataactgaaggaaatagagacacagaaaaacctccaaaaaataaatttataaaaagttaaagcaaacacacaaaatacaagtagtaatttcttttttattattacataaaaaacaaacataatatagtctgccaaaattgctgtgacagttttaaacagccctgtgatggcatccagttgataaaagtgagtagagccccagtatgtgagagaggcagagagtttccctctgtgacttacctttccactggagatccaagcaacccaggccaagagagagcactttgcttctcctaatccctggagttagcttagggagagtcttggagaaactgtgaaggaaagacaccaggaaaagtggcagaagttttctcagaccctggatgagagtaggatgccattttaaatctgggtgcatacaaagtcagccatgctttggtgccctagcaccatggctacagaggcactttagtcttgtgccagagattgaagcatcttatctggagtggggtgggggcctccacagccagaactgtaaaaaagtgtctcagcagtagtctctggaattgtgctctctcccatcacaggcaggaggagagctgctacagttgcggtttcttctgagcagcaagacttgcagccagggccagcttggcaatctggaactgatctgtgtgtgccattgctgagtgccccatcctcctcccctgagatcgtggtgcaacagagccctccctgctccattcctaggcagaaatctgggtatttggaacacctgcttgcctggaccggtggtctgagccacaccacccttccttgatgtatatggtggtacagagagggtctctgtgctccatgcccaagcagatttctaggcattcagagcgctcattcacctggttcagcagcctgagccacctaccctccttgtgcaaagactggtacagagggaccctctctgctacatgcccaggaagatctccaggcattcagagcgcctgcttgcttagttcagcagccagagtcaccccacccctcatgtgcagagatctttgtgcagcggggctctctctgctccacacccaagaagatctctagacttttggggcattgctcaccaggaccaccaagactgtccaaagatcttggtgcaaggaatccctctctgttcacactcaggcagatcaccagacattctgagcatacagtcatctggttcagcagcctgagctgccccaccatttatggacatagatcatggtatagtaagaccctttctgctccatgctcaggcaaatctccaggcatttagaatacctgcttgcctggtgtggcaacctgggttgcacaaccccttctgttcgtagatattggtgcaggaaggccctctctgctccacacccaggaagatctgcaggcatctgaagcacccactctcctggattaggaacctggaacacagaacttggagcaaaggtggtttcctgactccacatttagacacacttctgggtgcctggtagccacccactggattctcacttgatactggtgcttgtgcttgcatcaggggacctccaggcagacctgcccaactggtcccaccctttatggctcctacccccacagtgctgagcagggacctcagaccaatgtgtattctatgaatcaacccattgcctgggcaacagagaacttccacttctaaatacagataccagccactttgaccacagctggctgttatctacaggcttgtaggacaaacttcacagcccaatataaaacctgttgaaagaagtgcatactgctatagaagaaaaactgaaagaccctcctcagcattcttcacagtcacaccccataaagcacgtaagggaaagagaataatagtaatgacattataaggaaagaaagataaaggaaaagtcctacctgtatgaaaaaaaatacaaaaattagaagtgccagtgtctccaggtgagaagcaaccagcacaagaattctagcaccatgaaaaaacctgaatgtagtgaaaccaccaaaagattgagctacctctccagcaatggtccctagccaaaatggaaactcagaaataataaataaaaattcaaagcgtggattgcaaggaagctcattcagatccaagacaaggttgaaaatcaacaaaaggaaatttctaaagcaacccaggaaatgaacaaaaagataaacatcttaaaaagaaatcaatcagagcttctggaattgaaaaactcacgtaaagaattccaaaatacaaatgaaatctttatcaatagactgaaccaagcagaagaaagaatttcagagattgaagagtggtcttttgaactaacccaatatggcaaaaataaatatgaagaattttaaaaatgagcagtcctcatgaaatatgggattatgtaagaggactaaatgtatgaattattggcattcctgagagagaaggaaaaaaacaaacaacctggaaaatatagttgaaagaataattcaagtaacatgcctaatctagctaggaagatagatgtccagatacaagacattcagagaatacctgtgagatactatgcaaaacaaatatcaagccatgtagactacaaaccatgtagtcaccagattgagcaaggtcaacgctaaagaaaaaatcttaaagactgctagaggttttccttaggcaaagatcttaagatctttccttaggtaaagatcttaaagatctgctagaggacagatcatgtacaaagagaaccccatcaggctaatagaggacttatcaccagaaaccttacaagccaggagagactgggggcctattttcagcattcttaaagaaaagaaattccaaccaagaattctatatctcaacaaaggtttataagtgaaagataaataaaatattttccagacaaacaagtcctaggggaattcattaccactagaccagccttaagagagatccttaagggagttctaaacatggaaatgaaagaacgatacctgtaaccgcaaaaacacacttaagtacatagcctgcagaccatataaagcaactacacaatagaaactacaaagcaaccagctaacaacctcatggtaggatcaaagcctcacttatcaatattaaccttaaattttaatggtctcaatgcacgacctaaaagacacagagctgcaaggttgataaaaatacaagactcacttcttatccaagaaaacaccaaatagcagatgacgctggtggagcgagggggcccggaggactcgggggccctgggatggggaaccacagtggctttcgtggaggttttggcagtggcatctgggctgtggtcacagccatggacagagctggggctgaggccacggagctcactgaggcaaggccgaggatgagtggatgcccgtcaccgagctggacctcctagtcaaggacatgaagatcaagtccctggaggagatctacctcttctccctgcccatcaaagaatcagatatcattgactttttcttgggggcctctctcaagaacaaggatttgaagattatgatggtgcagaagcagacccacgtcggccagcacaccaagttcaaggtgtttgttgccattggggactacaatggccacatcggtctgggtgttaagtgctccaaggaggtggccactgccatctgcggggccatcatcctggccaagctctccattgtccctgtgtgcagaggctacaggggtaacaagatctgcaagccccacactgtcccttgcaaggtgacagaccgctgcagctctgtgctggtgcacctcatccctgagtccaggaacattggcatcatctcagcccctgtgcccaagaagctgctcatgatggctggtatcaatgactgctacaccttagccaggggctgcactgccaccctgggcaacttttccaaggccacctttgatgccatctctaagacctacagctacctgacccccaacctccggaaggagactgtattcaccatgtctccctatcaggaattcactgagcacttcttcaagacccacaccagagtctccatgcagaggactgaggctccagctgtggctacaacataggatttttatacaagaaaaataaagtgaattaagcctgaaaaaaaaatacaaggctcatcagtctgctgtgttcatgaaacccatcttacgtgtaaagacacccacaggctcaaagtacagggttggagaaagatctaccatgcaaacagagaagaaataaaagcagcggtcacagcccaggtgctgtggctcacacctctaatcccagcactttgggaggccaaggcaggcagatcacttgagcccaagatttcaaaacaagcctggacaacataggaaggccccatcctttaaataataaacaaaaaagcaggggtcactattcttctatctgataaaacatactttaagccaacaacagtaaaaaaaagacaaagaaggccattacgtaatgataaagggttcaattcaacaagaagtcttgactctcataaatatgtatgcatcaactttggagcaaccagatttataagcctgctaaaagacttagacagccacacaataatggtaggggtcttcaacccccaactgacagcagtagacaggtcatgaaggcagcaaactaacaaagaaactctgaacttaaactcaacacttgaccaactagacctaatgaaggtctagaaaacactcaacccacaaaccacagagtatgcattcttcttatctgcacatggaacatactccaagattgaccacatgctctaccataaagtaagtctcaatgaaataaatatcaaatcaaccatactctcaaaccacaatagaataaaaatagaaatcaataccaagaaaatctcttaaaactacacaattacatggaaagtaaataatttgatcctgaatgacttttgggtaaacaatgaaatcaaggcagaaatttaaaaattatttgaaataaatgaaaacagagacacaacataccaaaatctctgggattcagcaaaagcagtattaagaggaaagtttatagtgctaaatgcttacctcaaagagttagaaagatctcaaattaacgatctaatatcacatctagaggaactagaaaaacaagaacaaactaaccccaaagttctcagaagaaaagaaagaactaaaattagggcagatattgagaatcaaattgagacccaaaaattcatacaaagtatcaacaaaactaaaagttggttctttgaaaggataaacaagatcaatacactagattaacaaagaaaagaagagagaagatccaaataagcacaatcagaaatgacaaagaatgacattacaactgatcccaccaaaatacagaaaatccttggagaccattatgaacctctctacacacaaaaactagaaaatctagaggaaatgataaattctgggaaacacacaatttcccatgattaaatcaagaagaaattgaaacattgaacagaccaacatcaagttctgaaattgaatcagtaataaaataaaaactaccaaccaataaaagccccagacaagagggatttacagccaaattctaccagatgtacaaaaagctggtaccaattttactgcacctatttcaaaaaatcaagaagggagtcccttctaacacattctacaaagccagcatcaggccaataccaaaacctggcaaagacacaatgaaaaaaagaaaattgcaggccaacattcctgatgaacatagatgcaaaaatgttcaacaaaatgctagcatactgaattcagaaacacatcaaaaagctaattcaccatgatcaagtagacttcattcctggaatgcaaggctgattcaatgtacacaaatcaataaatgtgactcaccacataaagaattaaaaacaaaaacaatatgattatctcagacacagggaaagcttttgataaaatccaacaattttttgtgataaaaaccctcaagaaactaggcatcaaaggaacatacttcaaaataataaaagcaatctatgacaaacccacagtcagcatcatactgaatgggcaaaaattggaatcattccccttgagaaatggaacaaaacaaggatgcccactctcaccactcctattcaacatagtactggaattggtagccagagcaatcaggcaacagaaagaaataaaaggcaaccaaataggaaaagaagtcaaactatctctcttcatggacaatatgattctatacattgacaaccctaaagactccaccaaaagcctcttggaactgataaatgacttcagcgaagtttcaggatacaaaatcaatgtacaaaaattagtagcagttttatacaccaatagcattcaagctgagggccaaaacaaaaatgcaatccgatttacaatagccacacacacaaaaaaatacctggaagtacatctaaacaaaagaagaactacaaaacactgcaaaaagaaatcagatgacacacacaaatgaaaaaacattccatgctcatagattagaagaatcaatatcattaaattggccatgctgcccaaagcaatctacacttttaatactactcctatcaagctaccaacatcatttttcacagagctagaaaaaaaactattctaaaatttatacagaccaaaaaagagcccaaatagtctaagcaatcctaaaaagaaagaacaaagccagaggcatcacattacacaacttcaaactacactatatgctacagtaccaaaacagcatggtactcttacgaaaagagacacgtagaccaatggaacagaatagagaacccataaataaagcctatgccatctgatgtgtagaacacctaaagccatctgatctttgacaaagttgacaaaaataagcaacagggaaataattgcctattcagcaataaataggactgggatagctttccagccatatgcagaagaatgaaactggatcccatatactacaattaactgtatacaaaaattaactgaaaattgattaaaaatttaaacataagacttcaaactataagaattctagaagaaaacctaggaaacaccaatctggacatcggcctggggaaagtattgatgactaaattctcaaaagcaattttaacaaaaacaaaaaatgacaagtggacctaattaaactaaagagcttctgcacaccgaaagaaactatcaacagagtaaacagacaacctaaagacagggagaaaatgttcacaaactgcacctgacaaaggtctaatatctagaattcacatgaaacttaaacaattgaacaagcaaaaaacaaataatcccattaaaaataggcaaaatacatgaacagacacgcctcaaaagaagacacacaagaaacatgaaaagatgctcatcatcactaatcatcagagaaacgcaaaacaaaaccacaatgagatagcatctcacaccagtcagaacggctgtgactaaaacatcagtaaacaacagatgttggcgaggctgtggagaaaagggaatgttcctacactgttggtgggaatgtaaatcagctctgccaatacagaaagtagttttgagatttctcaaagaagttaaaacagaagtgtcatttgaccatgcagtctcattaatgagtatatatcaaaaaaaaaaaaaattctaccaaaaagacacatgtactcacatgttcatcacagcactatttgtgataacaacatcaaggaatcaacctaggggcctatcagcagtggaatggataaagaaaatatggcacatatagactatggaatactatgcagccatagaagagaacaaaattatgtccttttctgcaacatggatgcagctgaaggccattatcctaagcaaattaacacaggaacagaaaaccaagtcctgaccattctcacttataagtggcagataaacatccagtactcacggacataaagatggcaacaacagacaatggggactactcaaggggagagggagagggtggggcaaggtttgaaaaactaactgttggctactgtgattaatacctaggtaatgggatcatttgtatcccaaacctcagcatcacacaatatatccagataacaaacctgtgtatgtacccccaaatcaaaactaaaaattgaaaaagaaaaaaaaagttttaaaggcaaatcctccattgatatacttactttgttacatataacgccatagacaatttattcccctcccccgcccaaatttgtttgccgaaacgtaatccccaatgtgacaatatttgaaggtaaagccttcaggaggttatttgttcccttataaaggaggccccagagagatcctcctcccctcccaccatgtgatgacacagcaaaatgatgaccatctataaaccatcatgcaccaaatctaatagtgccttgatctttgacttcccagctcccagagctgtgaaagataaatttctgttgtttataagctatctagtccatgttttttttatagctggctgaacaaactataatagatgacttataagtagttttcacactggccttattccacagaccagtctttgaatagtaatgactaaaaaaattaggactttttgtctctcaatgggttctataattagcaaccacaataatgtttcaagtacccaaaaaatgtcatataatgcaatcacttaaaatgaatataagcaaagaatatttactgatgtgctgagtttcttccatacattaatgggaaaaagcatattagaaaacagtatgatcccacttttattaaagaacaagagcaggtttaaagagtcagaaagtataatagtggttacttctgggtaatggacttataaggattttttttcctttgttgtttatgtttcattagctatatatgctaattttgtacagtggtcatatatttcttttatctaaatattaggactcattgaaatggattactattttaaaattgattattcattcaatatttttatatttcaatctagggtctgttactgagtccctaagtgcttttataaatggctggataggcacctctgtaaataaagtacgtagccttagaggctgaaacaatgtaagtgcacaggaaacatttattgtaagaaaatgaaaggagtgaagttctttggttcttatttttaaagcattatgtgtcaaaaatgtatttggttgagtgtcatcaatttcatgtggcctaacctaatgttaagtggagttacagctaagtaaaatgttctgtcccgctttgagttaacaatcaatcatgtgcttacactaaatggtggataatcattacttttatttattttataaaaatgtagtttggtatctccatttagaaaaaaaattacttcattaaaatgaatcaacttaaattgacatgggcttgttactctaaatttctacttgatttccttattgtaaattatcttcaataaattaatccttatctccctaggccaggtctttgacatgtctggaacaaaactcagccaaatattaaaatgggaggacagaaacagttcaactgaaacatattagcaaaatctaagttggatgaatttatgctttttaggatgcagagcactcatgaaattgacatttgtaaagcagcatttgtagcatattgattaaaaatattcaatatatggattttttaaacagtgaaccactcattactctaatgcctcattaatatggtgtcaatctattcagaacaatgcataatagcagtgcactttctcagcatgttattctattgttcaatttgaaaaacaacaacaacaacaaataatctcaagccttttccttaaatgttgggggtttgtttttcaaattatatgggttttgtggtactagaagttcaaattttactaatgtaaactacatttctctaactaaagaatcatggtcaatgtagagaaaattattattatagaagaaattgaatcagaaaaacacctttcaaaacctcctaattccctgccctgtccacaaaagagatggaaggcaaggaggtcaccacaagacactcagagcagcatttgctgcagcaactaaaataatgggagactcattccgttcttccttatttacctggaaatataagtaggaaaagatattttattttataattaaaatattttattctaatatttgctagggacaggaagatagaatagggaggaaggcaaatatatgatgcccgatggattctttggaataaaattccatagggaatgttcctagtattaggaaaaatcatttttaacatatagtaagcaagttacttgggatgtcataagtaggatagaagtcatatgaaagttataatagaagtccttttttcttagggtaaataaatataagtaggaaaagatattaatttttttatttattaaaatattttatttatataaaataaaagtaggaaaagataccctcaaaattcatctcactgtgccagcagggagccgttgaggaaaagtctattttcagtagggaagcttggaaagagctggccaagttgcaattctctcaagaaagtaacacctgcagagagcacacattactcatatttgggatactcatgacacatcatctagccccctcctccctgcatgttagcacacggtgagcacacccactttccagtgacttcttggtgttttgcttacagaagcctacattcagcatatgaatcatctagccctccgcaagaggctgcctggaaagaataaggttttagagaaccagccctatggattgatcattggttctgaccacacaactattatgacaagtgaaatagaataacaacaaacggctatgatttttgtctttgtggatggatttcatgggggggagggcagcagtagaaagtataaatgacatgaaagaaagaatattaagctccaaaattgtgcttaagtaaatctggaataaaaaactgcagcaggttcttattgctcaattccagcccatttgcagagaataaaaaggcaaagcaatgtgggtgaaaagcaaggaatttgccaccttagctttgaatactatttcatttatgagtttaactgtttccccaccagccttcactaatttcacttgatctccatcaagaaagatggagaaggttttgatgagcaaggcagcactgacaaaattagatgtaggattaaaaaagaaaaccaatccacaatgtaatgaattactaaatttaaagacaactagtgaattcctgggcaagcatgatggatgcattcaaacatagattcttgaatttgccacaatcctatgccccatagctatgacttttcaccaaaaagcaaatttttaagagccaaatttgccatcgatgtgagtgggttgcatcttatagtctttgaacaaaaaggacaattataggtacattgagttcctggttccttggaaactaatggtttcattctctgcagattgatcacgtcaaattcatcaggttcatttccaaaaataaaaatcccctgtatgagggaaattgtggatttcatgtcagtcttctcaggaaatatttattttatttcaaactataattccagttgatctgcctagcagaaacaagtgaaattgcttctgttatcattgagatagagtgatttccattttcaaatattccaaatggcatttacttgtggtaactgtaataatagagtaatacatttacagcaatgtgatagcaatatagaactactctgaaacacatgctgtatatctcatttctttagcctataagatatcaaaatgccaaacattacatacatatgtaattctcctacttaccacattccaggtaacttgcttacactgtatgttaaaaatgattttttcctaatactaggaactttccctatggaatcttattcaaaagaatccacctggcattatatatttgccttcttctctattctatcttcctgttcctagtaaaaaaaaaaaaaaaaaaaaagcaccgattgagaaggaagtgtggtaaggaacagaaaatagcatcatctgtcttcacttacagaaaggccttgcactgtaagtattcatcagacatttgttggatgttttccataatcacctcatacctgtgaggatggctattatcaaaatgtcaagagaaaacaagtgtgcacaaggttgtggagaaaagagaaaccttgcacactgttgatgggagtgtaaattgctagagccatagggaaaaacagaatggaggcctctcaaaaaattaaaaataaaactaccatataatccagcaatcttttatctgggtatatacccaaaggaaatgaaataagcaactccaagggacgtcagctttccatgttcattgcagcactattcacaatagccaagacataaaaacaatctaagtttctgttgattgaaaaattgattaaaataattagggtactatgtatatatacaatggaacattattcatccttaaataacaacatggatgaacctggagaacaagacattatgctaagtgaaataagccagacacagaaggacaaatactatatggacttacttgtatgtggaatctgaaaaaaaaggtgaatacatatagaatattgataaaagaaaaagttaggcagaattaaatttaaagtttaattgagcaacaaacgattcgcaaatagggcatcccccagaatcacagcagattcacagagactccagcacagccacgtagtgaaagaagatttacagacaaaaaaaaaaaaaggaaatgacatacagaaatcagcagtaaggtacagaaacaactagaatggttacagcttggcatttgccttatttgaacagtttgaacacttagcagtctatgagtggctgaagtatggccactgggattggccaagactcagttattgttacaggtgcatactcctaagcttggttttcagttttgtctgacttttaagctaggttacagttcatccacatggactcatatatagaagtatggagtccttctcagaccatatttagtttgctttaacagtataatggtgcataccatggacagggaagaggaggaaatgaagagacataggtcaaagggagcaaacttgtggttatataggatgaacagaccaagagatctactgtacagtaggaggactatcattaataacattgtattgcaatactgaaaatttactgagagtagatgctcttactatagaaataaaaatatggaaagtgatggatatgttaaattgcttacctatagtaatcatttcattatggctatgtatagcaaaacctcatgttatacaccttacatttatacaatgaaaatagtattgtaccagtgttaatttcttagtttggcaaatgcaccatggtaatctaagatgttacagtagggcaaattgagtaaagaatgtacaggaactctctgtactatctttgctactcttctgtaagtctaaaattatcctaaaataaaatggttctgcccctaacaaacttttgtcatcattttcactgccccagaggatcagactaagttacctccaaggctccttttaattttaaattgacaatttatgattcaagtaaggatcacttcctgtgtgaaacattattttatttatccagctaaatacaatattgctttttcagttcccttctctttttcttgtcatgctctctatgttatacatctatgttcatgtcttatggctcctattatatttgctagttctctaagcgatgctgcatttttaacttgatatttcctacagccctatggcagtggcctgcattcaggaaattccctctaaaattgaatgaattacaaaagcaatattcctgccaatgaaaaggttttgtactatgaggaatttaccagtttttcctctcctgaatattaaagaccctctgccagaagtagcttaaggaaacgactctttcccattctctattcagatcctctccacttttggtttctagcccttcatcctgtgttggccaaaatgatttgactactttatagaaagctgtcgttttaccaagaacacaatttttaagcctttccatccataaatgtttcatttaattcttaaagtttaggccaggcatggtggctcatgcctgtaatcccagcacgttgggaggccaaggcaggcagattgtctgggctcaggatttcaagacctgctagggcaacatggtgaaactctgtctctacaaaaagtacaaaaattagctgggtgtgtcgtgtgtgccaatattcccagcaacttgggaggctggggtgggaggattgcttgagcctgagaggttaaggccatagtgagccatgatcgcactactgcactctagcctgggtaacagagttacatgctgtctcaaaaaaaatttttttttaaataaaaaaactaccaagccagcactacaagaactgctaaaaggagctctaaatcttgaaacaaatcctcaaaatacatcaaaacagaaccccctcaaagcataagtctcacaggacctataaaacaacaataaagaaaaaaaaggtattcaggcaacaaatagcacaatgaatagaatggtacctcccatctcaatactaacattgaatgtaaacagcctaaatgctccacttaaaagatacagaatggcagaatggataagaattcaccaaccaagtatctgctgccttcaagagactcacctaacacataaggactcacataaacttaaggtaaagggatggaaaaagacattccatgcaaatggacacaaaaagcaagcaggagtagctattcttatataagacaaagcaaactttaaagcaacaatgttaaaaaaaataaagagaaacattatataatgataaaaggccttgttccacaggaaagtatcacaatcctatatacatatatatatatatgcacctaacactggagctcccaaatttataaaacaattgctactagacctaagaaatgagatagacagcagcataataatggtgggagacttcaatattccactgacagcactagacaggtcattaagacagaacgtcaacaaagaaacaatggatttaaactataccctggaacaaatggacttaacaaatatttacagaacattctccccatcaaccacagaatatgcattctactcatcagcacatggaacattctccaagatagaccagatgataggccacaaaacaagtctcaataaatttaagaaaattgaaattatatcaagcactctctcagaccacaatggaataaaattggaaatcaactccaaaaggaactttcaaaaccatgcaaatacatagaaattaaataacctgctcctgaatgatcattgggtcaacaatgaaatcaagacaaaattaaacaattatttgaactgaacaataatagtgacacaacctatgaaaacctctggggtacagcaaaggctgtgctgagagaaaacttcatagccttgaatgcctacatcaaagagtctgaaagagcacaaatagacaatctaaggtcacacctcaaggaactagagaaacaagaacaaaccaaactcaaacctagcagaagaaaggaaataactaagataagagtagaactgaatgaagttgaaacaaaaaagcatgcaaaagataaatgaaacaaaaaactggttctttgaaaggataaataaaactgatagaccattagtgagattaaccaagaaaagaagagagaagatccaaataagctcaattagaaacgaaaaaggagatattacaactgacaccacagaaatacaaaaggtcattcaaagttactatgaacacctttatgtgcataaattagaaaacctggaggagatggataaattcctggaaatatacaaccctcctagcttaaagcaggaagaattagaaaccctgaacaggccaataacgagcagtgagattgaaatggtacaaaaaaaaattgccaacaacaaaagtccaggactagacggattcacaggtgaattctatcagtctttcaaagaagaattggtaccaatcctgttgacactattccacaaaatagagaaagaggaaatcctccctaaatcattctatgaagccagcatcaccctaataccaaaacggggaaaggacgtgacagaaaacaagaaaactacagaccagtatccctgatgaatatagatgcaaaaagtccttaacaaaatactagctaactgaatacaacagtatatcaaaaagataattcaccatgatcaaatgggtttcattccagagaagcagggatggtttaacatatacaagtcaataaatgttttacactacataaactgaattagaaacaaaaaaaaatcttaaaagtctaggctttctgcctttactacacagagttgatcaacttcatctgctactttttctagctctaaatctgattcacaatcattacaacccaggaaacataataggtgcaacactcttttctgactctttaatagattgtttccatttggaaaaaaatctcatttatttgttggatatggaagctgtttcataaattttccagatctgagtgagaaaaagaatatttaagtgaagattacccataaaattttgaaacacacatccctttttttttcttggtagaagaataagatttcaaattttattttcaaaaacccatcatagaaaataatttttgttttctgtatgcctagcaaggagaaaatctagatccagatttagaaaatctggaccggctaatttttgtatttgtagtagagatggcatttcaccacgttggccaggctggtctcaaactcctgacctcaggtgatccactatcctcagccttccaaaattctgggatgacaggtatgagccaccacacctacagcatgggtgacagagtgagattcagtctcaaaaaaaagaaaagaaaagaaaatctggaccatagtctgacatacttcctaattgcccggagaatttatgaatttatattgagtcttaacagtgaggccttagacagtgattcagtttcctcagtgctagtaatcaaattctattgcttgtgacaaacacagaagataactttagcagataatataacatagcagataactaagtgaacaaatacacttttctatagcaagcataatctagcaaatactaccttgttttttattgtgtaagaacacttaacatgagatctaccctcttaaaaagttaagtgtatatttgttttgttaactataggcacaatattaaacagcagacctcaagaacttatgatcttgcataactgaaactttatagcctttaaaataggaactcttcattttctcttccccccagcctctggtaaccacaattctgctctctgcttctgtgtttgactgttttagatacctcagataaggggaatcatgcaatatttgtccttctatgactggcttatttcacttagcaaaatatcttcaagtttcattcatgtagttgcatatcgtaggacttcctccttttaaggctgaataataacccattatatgcatataccacattttcttcatttattcatccatcagtggacatttcattgtttccatatcttggctattgtgaataacagctgcagtgaacaagagagtgcaaatatttcttcaagatcctgatttcaataattttggataaatacctagaaataagattgctggatcacatgctatttctatttttaattgtgtaggtacctccacatagttttcatagatgcagcaccatttttcattcccaacaacagggtaaaaaggttccaatttctccacatccccaccaaactattatcttttgtgccatcccaacagttgtgcaatgataagtcactgtggacttgatttgcatttccctgattgtaagtgatgttgagcatttttccataaggttttttggccacgtgtatgtcttctttagaaaaaaatgtctatttaaggactttcccattttttaatctggttatttctatacttttgctaattaagttgaaagagttccttatatattttggttattaaccccttatgagatacatggtttgcaaatattctcttccattacatagatcgtcttctcactataataatcatttcctttgctgtgcagaaactttatagtttgatatagtctgttgtctatatagtctgttgtctatgtttccttgtgttgcctatgtttttggtgtcatatccaacaaatcactaccacaaccagtgtcatgaagcttttctcctatacattcttctaggagttttacaatttcatgtctcgtgtttaagtcttcaatacattttgaaataatttttatgtagggaaagataagggtccaatttcattgttttgcatgcagatgcccagttatctcaacaccattggttgaagagactctcattttcccattgtgtgtagtcttggcatccacatctaggatcaataaaacatatatgctcgtgttaacttctatgctgtctattctcttccatcggtctatatgtctctatgctagttgaattttgattactgtaactttgtaatatattttgaaatcaggaagtgtgatgcctccagctttgttctttttcaagattgctttggctattcagaatcctatgtggttccatattaattttagaattattttatttttctatatcagcctaccttcagatatcaacacttccttctgtcagataatatttgcacatcctgttctctgtagcctggaatgctctcctcctctcttttcactgccaccattataccacttatacctgcttaactgctatccatcagatctctgctgaaaagtaattccttagaatgtttttcagtaacactgttcacctccccactgccccttcccccccacacacacaatacctgaaatctctgcctacctaaggcaggtttttcctgagttttttctcaatggtataacatttgggactttgataggaagtatgataaatttgcagattgcacaataagaagtaaggacatttgaacaatattaagtcttccggtccatggtccatgtacacaggacacctttccaattgtttgtgtctttttctttcattaatgttttgtggtttttagtacaagtcatttaccactataattatgtttattcctaagtattttattctttttaatgttattgtaaatgggactgttgcttaatttccttttcagatattaaaaatgattcattattaatatttagaaatgcagctgattttgtatgttgattttgtatcctgtgactttgctgaactcatttgttacttctaacagtgttttttggtggaaacttcagggttttctatatatcaggtaatgtcatctgcaaacggggacaatttgacgtcctctttttcagtttgaatgccttgtgtttctttttcttgcctaattgctctggctaggacttccagaggagaagtacctaatgtagatgacaggttgatgggtgcagcaaaccaccatggtacgtgtatacctatgtaacaaacttgcacgttctgcacatgtatcccagaacttaaaacataatttaaaaagaagggtggtaaaagtgggcatctttgtcttgttctggattttagagaaaaaactttccattttcagcattgagtataatgttaactttgagcatttcatgtatgtcctttagtatattgagttagtttccttctattcccaacttgtttagaatttttatcataaaagggtattgaattttatcaaatttcttttctacatttattgagatgattgtgtggtttttaccctttattctattaacatggtatatcacattagttgattttcatatgttgaatcatccttgcatcccagggataaatctcacttggtcatggtgtctgatccttttaatatgctgttgtatttggttggctagtattttgttgaggatttttgcatctatgtttatcagggttattggcctgtagtttgcttttcttacagtgtctttgtttggcattggtatcagagccaaggtattttacttggtattttaatatttggcctaataagatgagtttggaagtattctgcttcctagattctttggaagaaattgagaacatctttaaatgtttggtaggagtcaccatttgacttttctttgttgaaaagtatttgatcactgattcaatgtccttactagttataggtcttttcagattttctattgctcagtaattcagtcttggtaggttgtatgttcctaaaaatacagccatgtcttctaggttatccaatgtactggtatataattgttcatagtagcctcatgattctttttatttctatggtatcaattacaatgtctctgcttctgttttcatttatttgtattctctcttttttccacagttatactattggggaaagttatactaatatcttgttaatcttatcttttaaacaaaccaattcttttattaaattttaaattatttttctattatatatttcatttggttctgttctaatctttattattttcttccttctgctaattttgggcttaatgtattctttttctggttctttggggtgtaaaattaggttgtttacttaagatgacctttttcctatgcggatgcttccttccatttctcctgcccttggacatcagactccaggttcttcagccttcggactcttggacttgcatcagtgctttgctcggggctcttgggcctttggccacagactgaaggctgcactgtcggcttccctgcctttaaggcttttagcctctgactgagccaatactggcttcttttctccccagctcacagacagcctattgtgggtatttgccttttgatcatgtgagacaattctccctaataaactccctttcatatattcatgtatcctattagttctgttcctctggagaaccatgaataatacagcacataactggaacttgaggtttttaaaatccatttagctatttctaagtcttcatggagagtttaatccatttacctttaaagtaatcattgctaaggaaggatttactattgccttgttgttaattgttttctgtctgacctgcaattcttttatctctggttatcttcctttgtattttttaaaattttttatattgatattttatattgaaattttatattgatattttatgtaggtattatctttgtggttaccaaaggtttacataacacaacttttattatgttatctattttaagctgataacaacttattttcaatcacatacaaaaatccctgcccccacatactttgttatattattgatgtcacaattcacatgtttttatattatgtatcttttaaaatatttttataggtgtggttatgtcagtacttttctggcttttaacttttatcctgaaagtaaaagtaatttacacagcaccattacagtattacagtgttctgttttgtctatatatttatcttcaccagaaatttttgtacttccctttccttttgttctgtcatttcacatcattttgtttcaacttaaagaactcccttaagcatttcttgtaaagcagttccggtagtggtgaatttcctcagcttgtgtttctttgggaaagtcattatctctccttcatttttgaatgatggtgttggccatatatagtgttcttagttgacagattttttttctttcagcacttttaatatatcatcctgctctctagtgacatgcaaggtttctgctgagaaatctgctgacagccttatgcagattccctgtatgtgataagtcatttttttcttgttgctttcaaaattctatttatctttggtttttgacaatttgattataatgcatctcagtgtggatgtctttggatttatcttatttggagctcttaggcttccttttttcctccagatttgggtaatttccaaccattatttctttgaataagctttctttccacttctgtctctcttcttgtgaaattcccataatgcatatataggccacttgatggtgccctataagtcccttaagtgagcttttatcactctttttcatttttttctttttgttcctctaactgaataatttctaatgttgtgtctccaagtttgctgatcctttcttctgcttgatctagtctgctgttgaatccctctagtgaatttttttagttattgtattcttcagctcattgatttctgagctggtttcttggtagtcttttttaatgttttctatttctttgttgaaattctcactttgttcatgcatgttctattgacctcattgagcatctttctgatggttattttgaattttccatcagagacataatatatctccattgcattaagtttgatttctggagattaatcttgtactttgttttggacatatttacctggttgtttttcccttggttcttcattttagtatatctggatgttatacaaaacagctacctcttccagccttcatggactggcctcaaacaaaagaagaccttcacctatcagcctgaccagagattctgggggcttctcaaatctgtatgctaggcaaaaccatcagctatgttcttagtagctcccagatgtctagaatatgctgggactcatctgcattctaagacaagtgagacagaagccagttcctcaggcaatccctggaaaaattgaaacgttaaatatgtgatccaactcttttcttcctcaggaagtagatgagatctgtcgtttttctcccacttgctctgtgctgagcaagaccctcccaggtctgtgatgggggccggcatgctagttcaaacagccatctttatttttagtagctccaggtgtctggaaaattgctgagtctcatttgcactctgagacaggtgagacagaagtcagatccttgggcaacccccaggaaaatcagaatgttgaacacataatgtagttctttccttccctctccggagagaagctgggaactgggggtttcctcccaagcatatagcaatacactgagggtggggattatggttagaggatgtctcaaagtttcctatcagcttcagtgtggttggttttttgttcacttcagatccaagagcttctaaactggcttctgaatttattgcaaaaggagttgacctgtgtattggttgttgaatcactgggtttatgatgggaacgaagatccaagtcttcctattctgccatcttgctgatgttactgtcctctaattcttgaatgccttctatgtaacagagaattttcatgcacactatctcatttacttttcttaaaattctgaacaccaagttgacaaaaactaaatcgtaaagtataagatttagtaaaaatgtaggctcaaaatttttaatcacaaagctggtaagaggatttgaactcaggtacccaaagcagagtgtagtgctcctctacccagggtgtcaaggagatgtgtcaatgtgtagcacatggtttatgttccttgggtttatttaaagcctctgagcctcatgtgtgtgttgctgtagtagtggaaaccactatcttgctaagaaggcttcacattggatggacagcaaattaccttttccattcattcacctattttcatgctgaaaatacttctcaatatttttgagtcaataaacaagaatgacttgttaaggctaggcttaccctagatggctcaggatcttgctggtggaactatttatgcctgcaaactatgaaataaaacttttgaaaactaaggccttgctaccagcatgtgtcttgtggatcagcagcattagcaccacatagaagcttattagaaatgtggaattgcaggccgtatcccagacctcctgatttcatatgcctttttgtttgaaaaagccctactctaaagcacaatatacattttgatgcttttctcatgatgtaataattttctagtatgtttgtgactaaatgcagtcaagaaagccctcaatttcttatttttctatgttcccttattttaaaataataaataatgaagagagtcttcattgcctgttagaaaacaatcacttatttacaacaatagctttacaagtccagcaattcatctaaatgcccaatttgccctgtagctctacagcatgcccacagagccaacctaggtaagctatattctttatgggaaaaaaagagaaaaataagttgatttggtaagtttttgaagttgaaacattgtaatggaaatatcactggactgggttcaataagacctacgtttaagtaagaattttccttgaaccatcaagatattcttggacaggactctttccttttctgggtcttgggtttcctcatgtatattaagaagttggcataacctgtgctccaaggtcttttcccacgcagaacatttgctaatttttctttaatagatctctccttgttccccttgtaaaccaaaaataaaattctcaggccccaaccatctaaatggacttcctcttcatccagggcactcttaaattttaacttgagacaccagttcttgtcatgacaggaagctggaggtcagacatgcctcactctacctctctggcattaatatgaatacagactttaagcctgataagaaacattttacagcccattctctctgaagcctactaactgaaggtttcctctgcaaataagaactttggtctccacaattctttatcttaacccagacatttctttctattgatcccagatctttacataaactcaaccaattgtcaagcagaaaattttcaaatctacctgtaagctggaagcacaagctccaagttgccctgccattttggaccaaaccaatgtatttcttaaatgtatttgattgaagcctcatgtctccctaaaatgtataaaccaaggtgaaccacaaccaccttggacatatgtgctcagtgtctgccaagggctgcgtcacaggccatggtcactcatttggctcagaataaatctctttgaatattttacagagtgtgactctttttgtcaacatcttcatctcctcccccactgctatttcctagtccaagtccttcatttattgctatagcttttttttttttttttttttttgacagaatctcgctctgtcgccaggctggagtacagtggtgcaatctcggctcactgcaacctccgcctcctgggttcaagcaattctcctgcctcagcctcctgagtagctgagactacaggtgtgcgccaccacatctggctaatttttgtatttttagcagagatggggtttcaccgtgttggccatgatggtctcgacctcctgacctcgtgatccgcccgcctcagcctcccaaagtgctgggtttacaggcgtgagcaaccatgcctggcctgctacagcattttaactagtctcctgattcctgctttcttggtttcctgcttcctcagttcaactagtattcctttgttcccaaaagaaaagctgaccatgttcatctcatgcctggaacactttaacagccccaaggctgtttctgttgcttgaaggtgctatgctcatcttctgtccctaaccacactgctactttccatcccctcttgcctgaaatataccacacacaccagcctctttacttagcttaatgttgctcatcttttttcttttgagacggcatttcacccttgttgcccaggctggaatgcaatggtgcaatcttggctcactgcaacctccacctcctgggttcaagtggttctcctgcctcagtgtcccaagtagctggaattacaggcatgcttcaccatgcccgactaattttgtattttttcagtagagaccgggtttcaccacgttggccaggctggtctcaaactcctgacctcaagtgacccacccgcctcggcctcccaaagtgctgggattgtaggtgtgagccaccacacctgcccttgctcatcttttaagtgtcatcttcaccgtcactggtaaaatactcttgctgccatggtgctctgtgcttttagtcataatatttgttgcttcttactgttattgcttatttgtaacttatctctgtgagggctgagaccagtgttccgtgctcacaatcatgttcttgtagataataccaagtaagcactaaaaataattgcttgaattgcctatatgaattcttgtcttctacttccattgttgattaaataataataagctctaaatattgctttaaggaataggcataattcactcaagacatgtagagaaattcctggcatatattattcacttaatgtatgctagctattacaattgttattattcttttctctctttaattacagcagtcagtatgggcttaattataattacctgataactaaaaatttctttcttactttgaagctaaatggaatacttaaaaatgtagatgcattaatcaattaaacaaatgcatcaggttaatagtatttcttattccaatgaaacaaagaatcatattgttatatactatatatataactcatcatattattataaattatgcaccaatatatttgcaaaataatgcattgaattattattaaattcttctgcaaatggtgtgtgatttgttttctcaaagcttaacttaatgggaaaggcttgagagaaattgtcattgtaaagaaaataaatcctggatacttatgacctaaaaggaaatctggcatgtatctcttaatattcttagaaattactcaaaggttcagcttttattaattcataactcttcaaagttatgaatcaatagatcctaaactccaatctcccatccaatatttgaatctctgtggcaccatcttagcccggtgaatgaacagccactgcatggaaagggagaagattaaagctctattagttcccatagcaacatatgatttattaaagttttatctatgatttttttaagaatgcattctctgcaaatcagaaacaaattataacatagtcatagaagaaaaaatgaagatggatggtggataaggaaacaattgagatatttatattagtttccttctttgtcaggcattaaataattatacaggtaggagttataaccagaaaagatgcaaaatatcagtcttattctatcaccattatatcattcaatattactcttattcccaatttacaagctttcttcattgtctcctagctattctttgttgatattctttctctccatctgattcctccttcctccctttttactttcatgcttctcttcctactagctctctttgtttgtccaggtattctttcatttctataatacaataatatggttttaccttaataacccagaaactgaactataataataaaaataaatactctgacacaggaggggtaggctggacagccacagtgagaatatgtggttaaaggctcaaaacatgtaggctggttatgtggatggatagataaatttaattttacagatatttctcaagttccaaacagtaaagtactatgctgtatactgtgatagatgataggtgaggtctcattttctgtacttcaatggctaaaatctcccagaaattttatatacagaactaactaaacatagcacaaaggagatggtaagaaacaatgcaaagagaggaagaagtgagaaaaaagaggcacagcagaagagagaaggggaatcttatgcagggaggaggaaatagaaataaagtagttaacaaatggaaaattaacatggactacaagaaaggcatgtttcagaacttcaagcacattaacattggttttttcaaatcatgtggatctaacacacagccactggtgaaaatgctgcgtgctatgactttattcagtttttttgttttgttttgggtttttttttggagactgagtctcactctgtcacccaggctggtgtgcagtgacacaatctcggctcactgcaagctccacctcctgggttcaagggattctcctgcctcagcctcctaagtagctgggattacaggcacatgccaccacgcccagctaattttgtttttttttttgtatttttaatagaggggggtttcaccatcttggccaggcaggtctcctgacctcaagtgatctgcccaccttggcctcccaaagtgctgggattacaggtatgagccaccgtgcccagctgactttatttagtctttattataaattgaataaaacctttgtaaatagagatattttgtttgttgtaacctgtgtggattattgtaaattagcatgatatacttgtttcagaccaccaataacagccatcttatgaacagaggctttcaaataataggcaaatgtgtgaaaagagacttaaacatttctgtaaagaattctatgaaaattttcaacattgtcattagaacttgtaccattaaaattttctaataataaaaatcatttttaaaaattattttaatgatgctaaatttctatttttcactttttgaaatacatatggtagcaagcaataagaaaatatttaatgatgacatgccaattaacaagttcaatatgtcaagtaaaagtaataatgtttccttaacaccaaatagcacagcatgatttatataaatgcccatccttccaaagaatggaatcctttcacttggtgcaataagttgaatactgtctttttacagctgttctcaaagacaaagatatttttgagcttcatttataaaacataaatatcatattgttgttccagccttcttgtaattcaaaatagcatcagtgctggctgaacatattactcatgcattggaaagttagaaatggtgacaatttgaagttaacattgtgaaatgaagatgaacgtgcaaaatgttctagctatattctgttttatgtgaataacctgaacatatttcttctttatatattggtttaagaagatgttataaatacctaacttggggacagaagaattttagtaaaggagaagagacatttaaaattacttctacgtcttactctaagaacaatctgccaattagtagagttgtatgtttccaggtacacagccatgtgtcctaagattcagacagaaggttgtgagtttacaggaagaaagaaatcgattctttctggggtatcctaaaggcttctcacagaaagtggcacttgaatagtgtcagatatttgaagcagggacaggatatttcaacaagaaggaatgcataaataggacatagacagggaagcagccggggcatatggagactggggagtttggctatttaatggggttcatggaggttgtgacagagaagtagtgtcagataagatggatggtaaataggggactaattgtggaaggttttgagtgctaagctaagtaattcagtttttatttggtaatgaataagaaaccccatggttttttttcccccaagttttaaaatgctgaatacacacatgatcagagctggctatttattggatacttagaatgcacccagctatgttaggtggtttataaatattatccaatatgatcatcacaaaagtatggttgaaagaagtattaaccccatttttcagatgagagaactgagtctcaggctatataatttgcctgtgtacaacaatctaacaagctgatttttttaatcaaaatctttttgttcattactctacataatcctgttgttttcataattctattgttttaacaaaatcctgttccactataatcctgttatgcttcataatctagtattttgaagaagataaaaatagaaaagattgagaatatgtcagagactattttaatagcgcaagaagtaatcattctgattcagttatgtttgtcactagttcaagtaacggcaaatctgagttaccatggtttctgaaaaaatgcacattgaaaaattgtatgatggttattttagatttttagcatgatgttgaggtttcctatgcaagggaaattttaaatttgttttttgcctgttggatttcttatgttattcagaaagttttgcaatgcctataatgggaactttcctagtaatatgcattaaatgtaatttccacctttttagaccatcaaaattaagcacatagtgtgtgtaacatctaaactatggcaagcaccttaattacatttttcctcttaatctcacaacaaccttgtgatgttggtgtccttctcccattttatagatgaagaacctaaggctgagagaaattctgtctgtatacgatgcaaccaacgttcatattcagccctatttgtctttaaatcactactgtttccactacagccaactgccctgtaactcctcatgtaataaaaacgactgatcttaaagtgataattcatatttcatgattgaaaaagaataaggaatcatccgtggcacaaacctgaaatgcagggagtgtagaatctatgttaatacataggctttgggatcaaaggaatgtgagattaacgctcatatccaccatcttaaagctgtgtggccttggatgtattacttaatctttcagaggctcgactgctaatctgaaaagtgcaaatagtaatatctacttcagggagttgttaagaggattaagtgaaataatgcctaaaaagtacttaacacaaagtaggctctcaataaaagtaagctctaggtgcatagcacactatgctatttccttgattctcatagcttcatctctgagtcaatcacttccaaatattaggtccaaacctctcttctgaattctggatccgtgtatcccatcacctacttggcatctgcacttggatgcccacagtcatctcatactttatatatatcaaactgaactaatgatatatgtcaccctccttccttccctgctagtatgtgctctcctgcttttatggtagtgaggtaggggtgagtgtgtgtgtgtgtgtgtgtgtatgtgtgtgtgtacaaaatcaacactgtaaccagcccacaactaatccattcttaagtcactcagtgctaagggatatgccttctaaattccccccaataccaccctagtcctagtggccatcatttctctcctaactaatgcagtcatatccactgctgcctatactcaccaaccagttagccatactctaaccagagggaccttcctgccccttgagttttaagattggcttaaagtcttattccactttgatggaaatccaaatcccccttggagtttttgttaatttggtgtaaacattcattcttataaattcttcttccctcaggagccaacttccacaaatactgcttctgtgccctaacacctccaggtgaaacccagccctttctacaagttccatggatgatccactcatacaaagcatttgtgaacgttgggactcagggtgacggagaactatttgctattcagaatgtgaactccccaatggtgcattagatatttccagtcttgaatgtcctctgccctcctcaccatctggatgtttccattggcagattgccccttcttcatcccagcatcatatcatcttgggggctctcatcttataccctttttttattccagatttctttattctttattctttattcaaatccgttgtaatttgaatcccagtttggatgtctggtttttgtttgcttgcctaggttcctcaattcaccccatcagtatttccttctatcccaagtggttagttaccaagtatttttccaataaaactttccacccccaataggaattctggagccagcaagtaacatcataaagtttttgcttctattacagaaggtaaatcagatcatcccacacccctgctgaataacccataagtgtcttcccatcgcctttagcataaagcctctaacttttttagaagggtctacaaagtttcccatgatgccacctctactggccattcaaatgttattttggtttctcatccacattgtgctttctccagcacccaggccttcacattcactgtccttaggtcctgttctttctctccaactaatcatcaggtcaactcttaccagcccataggtctctgcctaactagcacttactctaggctgcagccacctgctaggagctccttgatcatcaaatatttcttaacaatgctttttccacttgcaattatctagttatttaaaataatgtatttcctctctctccacagactcaaaacaccactagaacagaaaccagatttcttaactgtcatattctcagcaagaagcatacagcaggcactcaattgttaaaaactatctgaagtaaacattgagtcaagcatctgtgtaaaggattgccctaaatctcccttaacttctgggctttaatttattctgcctatatagggatcagtctttcagaagacccagaaaaccttagtgaaggtggagggcttattaaactatttgctttaaagttctgacaattttgttgttgctgatattaacaacccaacaagaaggggagttaaagggcagtgcttacaaaaggtcacaatatactgcctaaatatgctgtgagcttcgtaagtaggctgcactcttgttagctatcatcaggatttaattaactggtgtcacagctgaattgacatttcatgcctgtggggaaatttgactgaactcatccattccgaaataaatgattagcaccaccatctttcacattatctttcaataagtgggacagctacattttcacaacttgctggggaaaaaccattttcaaactctaaataccagtaagcatggaaaagaaggatggaaaataataaagtcaggcaaaatgatatttgtgggtgcttcattttatgaaaataaaacttgtttcagaggcagaatgaacctgttaggaacccctgtttttcataacaaattatgccagaagaatgttgcatagttttggaatttgcctgatcactgaactgttgagaacaaatgtattttatgggttcctgggttgtgggccgaccccctacccagtcagacaccagccaagcacagcttccaggtctttaaacttctcagcacagtaggccctaaaactgttcccatggtaaccttccatcaaacaggcgagctgtaaaacaggtgagctcaggctgtcatttgcagacaaaacaagaaaaagaaatactgactgctcttgttcgtgatgccacaaagagaagtaatactgattactgaataaatagactgaaagtcagaatagctgttgaactaaataggaatcatggcgttagtgtcctgacaaaaaaaaaaaaaaaaaaatacagcttctaaaatgtgtatgtctcaaagaaaatcaatgagaaaacagatcacaaattttgtagaaacattagttactgtttttggaggatctcctaaatatcggatccttggatggaaaatttgcatgtatggtttcatttgtccctaccccctaaaaaactgtcataataagcttttagtatttccatgatttaccttaaataactgaggttcaaagaataaaagtgagagactgtcacttaagtgggatttgaacccagatctctgtgtctccaaaatttctgtttttttcatgatgctacactttttgaggatttatcaggcatattctagaagaagtcagtcacagtttgtgctgagggaatttgccaccaattaagtacagatatgaaaggtagcatttgggaaatcatcttggctccaggatcttacagtctggggactgtagtacaatagagtcacaaaatctgtagttataagaattgccttgagtactagctcctccacaatataatagggtagccttgagaaatccatttaattctttgaacctcagtttcttcttctgtgaattgagacagtaacttaacggaatgttctgaggatcaaaggagaaaatatatttgaaagtgctttctaaaatataaaatttggtatatgactattattattaccctacatatcacataaaatcttggcacttctttttggcagaacaatttcttttcacttaaaactggcaggttgaattctttcctcaagtgtgttttgtttaatctccaaaattaggagctgtgcagagcttccagcctgagttcattttagaagtcaggaaataattgctgcattattatatatattgaactgtcattttacacatgcacacatggcaacttgatgagaaaatatcatttgtacttattttaaattaatgcttaattggtgacagactttagctatcacctacactctggttgggccaagaaaatagagtatgatctagaaactgaaggacaaaagatgagtaatggtcaaggaaatggcagtgcaaggaattcaagggctataacctggcagcctacaggctggggcagacctgccaatgtattttctttggctagcaggggtttattttgttgtaattgtgctttttaatgatgttcttaaacagtgcatgtaccctccagtctgctaacattccatcatttgtatcctcttacacctggctgcctctcacatgtatattacctgcctgacagtaattgggagatgggagtccctttaccaaacaacaggcaaaagagatgagttttcttcattttgaaaccataaagaatgtatctattgggaagctgaggtgggcagattgcttgagcccaggagtttgagaccagcatgggcaacatggtgaaaccctgtctctacaaaaaatacaaaaaaataagcagatttggtgtcgcatgcctgtggtcccagatacttgggaggctgaggtgggaggatcacttgagcctggggagtggagattgcagtaagccgagatccggccactgcactccagcctgcatctgatcatttaacacaggaaagactgagcatgcaataggctcaggcaccaaatcccacaggagtagagaactggcatactctatctgaaaggatacatttaggatacatattaaaaagtctagtaatccacagcccattgtaaatattctaattcaacaagcatttaagaacctgccatatgatcttcaggaaagtttctggcacagagtaagtatgatgtaagtagatgctctttgttatgtcatcatcatcatctttattatcatcattgctattattattggtcagacacaattctaggaagggcaaaggctcctaactcctgtcttcctctttgctcccaaatagagggtatccccagtgttctgctcagtttctgatgcatgcttgttgcccaaaatatatctgaggaatggctgcataaataatggaagactagagagaggccatctctggcctttgagatcaacagccaaaatctgctctgacaatttctgagagttgtgaataattctagccaggtgtcagaaggaacctggcgagtgtagccccgggactctgattttcctgaagaaactgaaaagaaagaatacccaggtggaaaaggtaccctggtagctggacaggatgtttagtggatgcattatgcaatgtctgcagagaatcatggccataagtgctatgtaagcaccaaacatcattaatattactatttaaaagaactgagcagcctattccttcctaggtggtaacctgagcacagcagaattttaataagtctgatcatttattgggttgccagctggagcactgaccatgctctggatgtacgtcacacagtctgatttggtgcaatcaacactggctctgactcagcatcttacctgcctgaactattgcaacaccctccttactgcctattggccttacatcatcccagtcagcctgttattctgcatactcctaattatataagtcttgctaaactgtaatggaatcatatcacttttctgcattacaagagttcatgatttcctttggcctaaaaaatatccaaactccttagcaaggcgtgtcttggtcttgggtcaccagcactctattctgatcatcctccgttgatctaaacactctagaggtctctggatgctcttcccgcttaacaagtgccttttctgaaccagattcccctggcaaactcacgagcatctttcatacatcacttgctccctgaagccttccctcacacccatctgcaggagcagaattgagggctttcttgtctacatgtccgtggcactgaacagttctcttgtattggccaggatatttggatgcaaatcttggaagtctagatcaaacaaattaaagaatatgttgggctttattcactcgtgtcaccaaactgcacagtggctgagcctttggatgagtgtgaccaggacctcagaccaaatcagggagtctaccactagcaactatcttcatggggcagaaattacaaacacttcagctctgcattcatacatactgaaagccagaaaggaacaagagctccttcccatgaattctagttataaaacttcagaggaaccactctggatggcctggcttagtccacatgagcatcacaggaaggggaccaggtgccatgattcccctagactgcttcaaggtgcctgctcagacccagtgacagggtaacatgatcagcaacccttgtcaggccctcattagatttagagtgggaaagaagcagtgtcccataagaaggtgcaagctcagatagaatttcagacaggcagaagagtaggtgtcatctggactgtcattcaaattcgataactaataacacttcagatcctaactgtgtctgtgagtttgcctctcactacagagtgagctcctagagttccagtacccatcttactcatgtgcctctgctcacacctagcatgatgcctgttgcccggttgccacttagctcatgcttgtgtgttattgaattaacaaatggatagctctccagggccctgtgaacaaaacatccggtgaacgtaattaccgaattctgtagtgtttggaagttagttaaacaaatgtttataaaaccgctataatttaaaagacattgagtggctcatgcctgtaatcccagcactttgagagtctgaggcgcacagaccacctgaggtcaggagtttgagaccagcctggccaacatggtgaaaccccatctctactaaaaagtacaaaaattagccaggcgttgtggtgggcacctgtaatcccagctactcgggaggctgaggcagcagaattgcttgaacccaggagacagaggttgcagtgagccaacacggtgccactgtgctccagcctgggcaacagagtgagagactccatctcaaaaaaaaaaaaaaaaaaaaaagcatcaagtgactcaaaactaaaatataacacaataacctttgaaatacaactagtatttattgagttcatagtgttagcatttttacgaaagacattttatgctcacaaaaattccatgagttttagcaattagccctattttataaattaagaagatgaagttaagagatgcttggacttcccctagttctcacaggtaaaaggctacagaggcggaagagaaacccaggacttctgatctcaaggctattgctttgctcttaagcaagttatttaacctgtctgggtaaaatggagataataactcttgtttctaaggattgctgtgaggagtaaaagaaaaaacatatataaacaaatgagcacatagcctggcccagatgagggcattaatggacaatagtgctaaattttcagtgatggtgggagctttccttcaattctgactagaacatatctctgacccgtttttgtccttgccccgcagcccaggaactcgtcctgtgttattctcctctttagtgccacccactctgtctccagtagcttctctccccgaagactgcttccagaacaggtcacaggctcctgggctccccttcttgctgaagccaagtgcccagaccccttttgctgcctcggttagctggccccactggttatggaaagataagtaccaagaggcataaggatatatggatcctagaccttgtcctgacatcaatttgctgtgtgacatttgtaccgctgttctctcaagcgtaaaatgagaatgctggaccagagaaatcactacattaaatttgttatgtaaaggaaatctcagtaaaaatatttttcctgcagagtcaagcaatattattacttcatctcaaaaaaagttttacatatttttttacattaaccaaataaatcagcattggacttgcctacatttatcagatcagtttctattacttttaactgttccttcctgctctacttctcagcagggattacatgcctgcagcgtacactcagaattttctcctgaacatagattccaggaaaagctaaggtaaagaagacagagtagaaagcaagagcacagatgacacttcttttaggcgcactgcctagatcgcacttggcctgctgtcttcctctcattagtcgcaccaactgaatctgattagcccactctgatttatttttggcaacctggaagtgcatgggccaatgcttattttcatggctgatacaatcatccccaaagctgtcgttagcatttggaagattagtccctttctctggatgattttattgcctatgaagcatcacgacacacattagacatgtatttcttaaacactttacaaaattgagtctatttactcttcttcttattatcacaaccaccttctgttattggctgctaaaacatagagaaagaattcttcataattacatatttgatgcttatgaacttattgttttctgagttagtgaatcatctgctataatcaacaagaactaaaagccagatttcaatgctactggttactcagtgcctgatttgtctacattttgcttaacagactttcccattatgcaccaaacagtactatctaggtgaaaagtgaataataaggaaatataaataaatattttctcctaaaaatgcaactttcagatatgaagcacaatatgtatatgatttctatttatatttgtggacagtaagatttattagtaaggatcattatttttaggtctttgagatacaaaaattctgagattccgaataagtcctaaagtacgtttagtataaaaaatgtatcatgaaaaatgaaacacactttggcaaattttccaataggttaaaagtaaaaggattttccatcagctctcggtgaatttgaaagcatatttataaccaggattccccattcactaagcatttaatgaataaacagccactgaccaccagcaaacttgcagctctggaggcaggactgtgttttggatccccagtacttagcaggctgtgtggttcttagtagattcttaatttgtatcgactagatgagaatatcaattagtaacttctatcatgggtatgattactctttcttttcctcgtacccaagtctcctctatccaatgaggacatctcagctgttccagatcccctcttgtaaagtctgtctacagaggattgtaaggaaagcaaaaagatagaagagaagaaaagataaaatttgcagagagagaagtttaaagagagaagggcgctatgataggggaaaaatgagaagtttaagaagtattgctggagacctcgggtgctctagttgattggggtctaatttgttgttgctgtggtggtggtggtggtgccagaatttaagaagtatttcaatgctgatgaattttccttaagaggaagggaagatgatgaggcaggagatgttgaggccaaccgacatattacttgtgttccctgcttgatcccggcaatgcattcaccgtgagatgaaggagggctctttgttttgcttaggaaggctagagggagggctctttgctttccttaaaaaatgcattgttcatgtccttcgcccactttttgatggggttgtttgtttttttcttgtaaatttgtttgagttcattgtagattctggatattagccctttgtcagatgagtaggttgcgaaaattttctcccatgttgtaggttgcctgttcactctgatggtagtttcttttgctgtgcagaagctctttagtttaattagatcccatttgtcaattttggcttttgttgccattgcttttggtgttttggacatgaagtccttgcccacgcctatgtcctgaatggtaatgcctaggttttcttctagggtttttatggttttaggtctcagttctcaaaagaagacatttatgcagccaaaaaacacatgaaaaaatgctcatcatcactggccatcagagaaatgcaaatcaaaagcactatgagatatcatctcacaccagttagaatggcaatcattaaaaagtcaggaaacaacaggtgctggagaggatgtggagaaataggaacacttttacactgttggtgggactgtaaactagttcaaccattgtggaagtcagtgtggcgattcctcagggatctagaactagaaataccatttgacccagccatcccattactgggtatatacccaaaggactataaatcatgctgctataaagacacatgcacacgtatgtttattgcagcattattcacaatagcaaagacttggaaccaacccaaatgtccaacaatgatagactggattaagaaaatgtggcacatatacaccatggaatactatgcagccataaaaaatgatgagttcatgtcctttgtagggacatggatgaaattggaaaccatcattctcagtaaactatcgcaagaacaaaaaaccaaacaccgcatattctcacacataggtgggaattgaacaatgagatcacatggacacaggaaggggaatatcacactctggggactgtggtggggaggggggaggggggagggatagcattgggagatatacctaatgctagatgatgagttagtgggcgcagcgcaccagcatggcacatgtatacatatgtaactaacctgcacaatgtgcacatgtaccctaaaacttaaagtataattaaaaaaaaatgcattgtattccccacactaaagtaagctgatgatggtagaggaagaattagtgcccctagtaaagacaggatccaaccccactgggttagctgtagcagcaagggtatgggggcattaaggaggagcaggagttagccttcagagcgtgagtcgggacaaagtggcaagaacaggagcacccttgggcaaagcagcccaccaggacaggggctgatgacttcactagacagtcaagtgctcccgctgcactttgggtctgtccatcataagcacacattgtgctgatatcctccatggcaccatcagagggatgagagggcatcccatctacctttgaggcctggaacctctgggtgcatgggtatctcttgcacagctgtgacccaccaccacactatacactcatcaacaaatgttcctcacctggcacattgcccagggcttgctcttggactgctggcactgccctgctccaccaagcaggggacaaccatgactcagctgctctgtgtttctgatggccaagaaaattgttccctacattctcaattcatttttcacacccactattgattcgacacccccttgggacactgacaaagcaaagttggagggtatgggtacaagagcagactgcacatagggccatgaaccattaacaatgcaatacttctagatttggtgcaggaggctagaatgtctgtgatcaccagccaataggttttaacagaaagtatagtaagggaaaagagatcaagcatctatgatagcaacctagacctttctagtcatattaaggatactgacaattgcttcaattactaatagaagtctattaacttcaaatcctagcttatgaaatgctgtggttgaaaaatgtcaactctctttaaaaatattctacagatgaatgagcctggcttagtcaggtcttaatgtgcattagtgttaatcccaatttatgttatacaggtaacaatctaagatcaatttttctttttaaggattacaaacctttgcgcatgtgtgtttaatttgggtatggggaagggagaagaagcagttagagagttctgtttaccctattggcagaaaagggccaacaggcacaggtcacaaccacaggcaaaaggaggttagagtagcctattattaaattaattttttttttctttgagacagagtctctctctgtcgcccaggctggagtgcagtggcgcgatatcggctcactgcaagctccacctcccaggttcaccccattctcctgcctcagcttcccgagtagctgggactacaggtgcccgccaccacgcccgggtaattttttgtatttttagtagagacagggtttcactgtgttagccaggatggtctcaatctcctgatctcgtgatccgcccgcctcggcctcccaaagtggtgggattacaggcgtgagccaccaggcccggccattaaatttaattttttaaaatacatactcttctcatcttcactcttcaccttcaccttcaccgcactgaatgtgcggaaagactccagggaggaacagaagatccccaacccctctattctagggatttcatatgtaaagcctgagacggtgaggatgaagaataaaaaattgtttatgaaggggaagaaggcatctgttgctaccttaaccgtcagatactatcatccccagcccctttttgcttccttagaaagagcccctgggaatcaatttgactatagaacaagcccttcctctagaggggcactcaaaccccaacatggaattggaagctctggggttaactgaggaagaaggggagaattgatagcacctcagccagcaggggagggggtctgcccttcattaatctgtaatcagccagctggacagacggcagcctgtgtttcaattgctcccatgtgaacaatgactttttccttttatgtgttctgctccccactatttcatagagagcctccctcacctccactggagacactaggtttcttgatcttttcttcaaagagaagggaggggagaggaggttgtaggtggggcaaagcccatctcatctcttcatctaagtcagagcatttgctctcctaaaaggaacctagaagggaagttctccaagttcttgctcagataggagcagatttctctcccccagcacaggtacaagacagtagcagaatacactggtcttgatgagtgatgccatcagtactgagtagcagagaggaagatttcaggaggcagggaggtagggcacatctggcgctggtctcaccctgatgcagaagcctagccctgcactgttctcctcttcagatgagtatgaggatcaccacagtcctgttcactgtagctgaatgtgcggaaagaccaggcacccatgagccaaggggtcttccctcagtcttggtgtgcaggcggcacactacttgagccctagatatttttaaattcctttcggttgtgtgggctgcattctttaggacattggctaggactaaatgactgaggatgaaaccaaatatgcctatattgcaaggattctcttgattttttttaaaaaaggcctttgaataacacagaactatgttcagttctagaattacttgttttgttgtttctatttctctggtgagaatttttaccctttcattcattatgagcatacttttagtttattaagtatagtaataatacctgatttaaagtacttggctacatccaaaacctggattttctcttgaaaattagtcacattttcttggatatttgtatattgactaattttggactatttcttgaatattgtgagtattatgttataaaggctgtaatatttatgtttcaggattaaactaatatttttgtcttagcaagaaattcacttggttggatggaacctacacatgctttctcgtgggtggcagcttgaaccttaggacaattcttttagctttggctgggctacctgcagcctgacctccccatgcatggctcaggaatcagcctgaggtttggacagactttaggaccccctccttttcaggattacctactcactttccattagcagtggttgccaagattctctcatcttttgcctcaggccagaaagactgagattttgtcagagtttcagctatctcacactgactgaagcatctgccctctggctataagctgatgtagaagatggatggatggatggatggatggatggatggatggatggatgcatggatggacggacggacggacagacacacacacagacagagagacagacagatagatagatagacataaaaataactcattctgtgccaattctgtcaagtgtcaactgccctccaaaatctctctgctttgttcatgattcagtctttagtcagttgtttatttggtaatttgtccagagtatatggttatttgctggagaaacagtcagagaggaacttgcatggccataactgaagcagaacttgcagaagcataattcaaaagaaagaaaagagtaatggataagggaaggagctagtatttgttaagctccatgtataggcagcacattaaataccttttctgttctttttctgttttcttgtgttttatccttcttgcccaaacaatgaaatgctcttatgaactttatgctagcctcacaattccacgtggaccactggcaatatagcatggttcatattttgtgtttgatcccagaagtacattgctcaatgttagaaacctgcccatgtgtctggaataactgccttgatacattctcctagaattttcctaggaggccacagcctcactccctcgtattttttcaaaacatgtaatttcaccacatagctgaaaccaagaacttccctagaacttaagtgtcaaaatgactttcattcattaattgactccttcacaagatgtttattttgtttattacatgacatagtccaataaagggatgttttaaaagttcattctcaatgcctatctcatattacagaaatctgcctaggatcaaccacatgaaaagcacttagcatatgccaggtactgatcctagagctggaagtgcagctggaaataacatgcagttcccgaccttagagtacttatggtctagtatgataagaatattaggaacacaatttagtctattcaatgttaagacagaattaaatttgtttatgccagacattctttataagtactagggcctgtaaaaactggatttctgaaaaataaaataacaagaaaaagtcagtacatttttcagtctataaaacctcttggagagtagtgatgtgtattgtgtgctttggttgctgaaaatatgtgagaaacaaaaatcaataagttaaactgttggtggaaatgtaaattagttcagccattatggaaaacagtatggaggttcctcaaaaacctaaaaatagaactaccatatgatccagcaatcccacgactgggtatctatccaaaggaaaggaaatcagtatgttgacgatttctctgcactcccatgtctattgcagtactcttcacaggaggcaagatacagaatcaacttaagtgtccagcagagggtgaatggataaagaaaatatggtgtgtgtgtgtgtgtgtgtgtgtatatatatatatgtgtgtgtgtggaatatcattcagccttaaaataaaaaggtaattctgtcatttgcaaccacatagatgaacctgaaggacattatatcaagtgaaataacccaagcactagaagataaataccacgtttttactcacaatgctaaaaaaaacttgcaagttgctctagcagatgtcgttactagagccaaggaagggagagagagggggacagccaaaggcttgttaagggatgcaaaagtatacctagccaggaggaatacgttctaatgctctatagtactatagggggactatattgacactttatcgtgtattttcaaataactagaagagtggattttgaatgttcccaacacaaagaaatgataaatgtttgatgtggttgatatgttaatcaccctgatttgctcattacacaatgtatatatgtatcaaaatatcacaggtaccccataaagatgtaaagttgttatgtgtcaattaaaaataagaataataaaaccaaaatcaataaattgagtaatttgttagaggcaaatgcccatatatcgtcaatttaatcagccattccttcactgatgtaacagaaacttaacagtcatgtgttatgtgttatatgacagactcagtgttaggacagtaagttaagagatgaagacaaatgaacatgtggaacaataatgagactgattttttgtactggtgaccatgggcaagtgacttaatctttctgagcctcagtttcctcagctacaaagtgagattaaaagtaacgatacgtatctcatgaggttattttcaacattaaatgagatgtttttatatatggagcgcctggcatagtgcctggatccctgtagattcttaacaagtttcagcaatttttccaccctgctattatagaaaagaaatttgaggctcagtgcagtgaataacttactcacccgggacactacatacctagaagataaattaaacccaagcacatggtacaaagtacatgagtcttgtttgagaccagaaagaaagattaattctgcctatggagtctgagacagaatcagggaggaatatttaaaccaattccatggatgacttttcaggtattgtccataaatacatatttggagacttggagcaaagtttttaaaaagtccatcaaccgctgatcccctagacaccagcagatcctccatctggtctcttcctcactagcatagcttccttcatctttaagagattatgctggttaatctttaatgacaaggatcaacaccagtttctcaatcctgacctttttataattttcagagctagcagatgagaggaaatagacgaaataactgccttgatatattctgctagcatcactccctctaaagtaaaaagagtacttctttaaaccatgtaactttgccagcacagttgaaaccaagaacttctctagaacttgagtgtcaaaatgactcattcattatttactcctccacaggatgtttattttgtttattacatgacactgtccacaaactggaagcagattttcagtggaaaaaaatcctcaaagtaaaaccctgagaagattattaatcctaagaaggataatctctttctgattttctttgtgtaactaaaatacctatgtaactctattttaagaaataaggcttaccataaacataactaatgtttatgatacacaacaatatgtaaaaattatcttagcataactttattgccaattatctgaatataacctccatctctttttattctgtttcattcaacagaatgctacagctttccatgtaactgtccaagatgataataacatcgttgtctcattagaagcttcagacgtcatcagtccagcatctgtgtatgttgtgaagataactggtgaatccaaaaattatttcttcgaatttgaggaattcaacagcactttgcctcctcctgttattttcaaggccagttatcatggcctttattatataatcactctggtagtggtaaatggaaatgtggtgaccaagccatccagatcaatcactgtgttaacaagtaagcatcatgtgtaatattgtcccgtttcttcttattgttcccctgtttcttcccgtagggctcgaattgacagactccacccagaatggcaaaatcacttgccttaatgccaagtgacgtagattcaaagttatgagctatattaagaatacagctgaagtttgatgtttactctttaccttgtgataacaaaaatatttttaaacccaaaaaagtaaacctcaatgatgtagtatattttgagactgagtaacaatttcaaattcatgattggaccatgtaattttctgctatgttgcttaataatgtcatcataacttgtttatttttttccagagcatgtattctcatattaagcaattcagtttggggacaatgaactgatactcctatttaacctgctcaaattcaggtataggtctttggctgagagagagaaaaagatatatttatttatcaattgttattccccacctcatcttcaaaatagctttgccttctacttcttaagaaaaaatgccaagaaaaaaaattactggcattttaaccttcattagtccatgtcataaagagttaaggctgacattgggaaatttttaggaatacttttaactccatgtgattttttttcactttactcactgactttaatatctaatctcaaattaagatgtgactctactgtctatgttgacatgtggaagaaaaactgatatctgtaagacagtagagtttatcactagcacaatataatggctcagcaaagtcccttttgcttgtgttctttagtgtaagttttgcaacagctgcaatttgttaaatgccatctatgtgtgattgttctggtgataaatacgtggaaagacagtgatattatctgttgggataaaaggaagcagaaactacaagaagcaaaaactcagaaccaagctagaggacatatttttaacacatctctcaaaaattaattaaagtctccattggcacaatcccaggatcagtagtgagtcctaaaaattaggaatggcatagacccaagaccttcaaagtttatagacataatgaacagatctactagttgaattaaagggagaacttacctggtaaaatactgtcttaaacaagctctagaaaaagatgaattgcaagtcagatttaggcagcagatataggcacataacgcctacaatacaaactccttaatatcaaaagctctgtcttacttatcttcataatttcataaacacctagcccaagccttatgcttgcttaatagatgatccataaatattagtacaatttagttgagcaagtaataggagagacccggggggaaaaattaaggcacaaagaaaaatagatttaggactgtaatgacggtcgctgatccaacatttatgagcatgcactcagccattcctcatcagttgcagctgaatgattcagccctttagctaactgttcatgaagaaatttgataggtaagcaatgctaaaaaatttctagaatatcacttagcatttgcaatgagttccattcaaaatatattctattttcctttgtgatgtttttctttgacctgtagggcttacaagtgtgttgaatatccaaaaatttggaaattttgcagacatcttttttcactgattccttgaggaagtgttgttgtgatcagagaacatattttatatgatttcttttacttgaaaattgttgagatttgttttatgggtccaaatatggtctttcttgctgtgtattctgtgagcacttccagggtgaagtttcaataagtaccgaccaggtcacgttgattgttcaagtcttctatgtccttactgattttctgtctatttgttctaataatgactgatagaggaatctgaaagtctccacttgtaactgtaaatttgtctatttctcctttcacttattttggtttatgctttacatattttgaagctctgttgttattaggtgcaaaagctttcaagattgctatgtcttcttgataaactgacccttttgactatatgtaatgtccctctatattccaagcaatatgccttgtgttaatttcccttttgcctgatattaaaatagccatagttttcttttttaagtgtttgtgtggcatacctaatccacccttttgctttcagcctacttctgtctttacgtgtaaaagggtttcctgcagacagcatagagttgagtcttgctttttttttccaatctaaaaatctttgtcttttaactggagtatttaggacagcactatccaataaaaagagaatgttaaccttatatgtaatagtagattttctggtagacacattaaaatgctttttaaaaaggtgaaattaattttaatatcatggtttacttaatccattatattcaaaatattatttcaacatataatcaatatacatatttacacattttttactttcatacataaatttaaatagaaataaagttgcactagcctaattttaatcgctcaatagccatatgtagctagttgctaccaatttaaatagtgcaggtttagacaatatatatgtaattattaatatttattattataatataatacaattatttctatggttgaatttgaatttaccatattgttaggctgtcaggtagaacagggagtgagtcgatctagtcaatagttgagctgggtttaaggtattagacacctttcgttcatcacagatttccagttcttcccatgataggctgccaggagtggtagtgggtatttctcagtgtttcagtttcaccctcagtatgcagcaagccctgaacaccggcaccacagaagagctcccccagcaatagactgctgttgcttttcactcattgctaactttttggtggggacagaggatgttcttcgttctcgtggtccagcctcaggcttaggcagaccctgtgatgttagatgggacattcttgacatttttacccctcaaactacaccgacactgaaattctacattaaatccatgggtcagagagattcctgcctcttctccagtggtagcagaaccactgatactctactttgtattagtgcaggactctggtcccaaaagagtttctgctcctctcccaggaacaggcgtcttttgtttctattcatccttcaaaagaagggatattttcctgagaactagaaaggaaagatttttctgcccctccacaatacattaaggcttctcctttgtattcaggaaaggtccagggaagtaagttttcttgctgtcctcttagtggtttcaattatcatctgcacacctgtcacccccatacccccatccccagccccccagagggaggctctctctagtcccctatcctgcctctggtagtcctcatgagcatggggtagaggcccaaggggaaagctagagagagacagtagactctgtttgtgtctgtgtctcccagttagtctagaccagtggtgacctagaactttgggatgatggaaatgttctatgtccatattgtccaacatagtagtcactaatttttaattttaattagttttagttcatttaaaatttgatttaaatagctctatgtagctaatagctaccatattggacagagcaattctttgcatccatttagaccatactcagcctttatgaatccattaaactcggagctgctttcttcttatctgcttcgatgttgtatcctcttcctgctgtgctttgccaaaggtgaaatagtgtgtcgcctctctccagaggggctggtcactccttcgaattcacatcacttggttcacttgctacctcacctctcctgtaacctcaagaatagttatgatttcgtgaattatgtggcttttccttgttgaggtggagaagaagtgatgttgtcctggggctttctacatcttaaggggaagagaaaacacgtattgatttccaaagagtaaaattaattcatgatggtctattaaatattatcttgtacctcatttttaaaggttcaattacattatcccaaatttgaggggcaataataggttgggaatatcagaagtgggaattagtgcacaaatatttctgtgacattaggcatgagctggcatttggtgacatttgggtttcagcttccaccttcataaaagagggaattgaagtacatgatgactaagataaattttgagctctgaaactaacattatctgtcagttaatgatgtgtttttgccatctttatttttctaactgaaagctttttaaacaagtttggaaaacatttgtagtatctgctcacagagttgacatatttctcctgagaataaaagagtacctttatagcagtcatttattgtgtgttagatgcttgtcttgatgaaataagcaatgacaaagcaattggccccagggcagtcctttgatatttcactatagttgttctgagtctgtcactcttagagaaagctgaaaaacatggcaaagaataaatttggcacagcagagtcatttggccagttcaaaagaatttcacaacccttaggctgtgacatgtcattaatatttaattgattgagaaccttcagtatattgcctgcccttcagagggaaggggtagtttctcagcacgtaaaaggatgcctggaatcagttccttggaaattgaggaaatgtcacatacacacagctgtgtcatgtgtcagtgaagttctacagatagtggctgtacacattaaagaatacacatagagacactctacaaatataatattctatacagtcctattctaaataaaaataattcatgaatttttattttagttatcaggtacattctctgtgccatgtcctaggtaccaaagaaataaagatagataaaaatactcataatcaaagatgttatactatagtggaagagacaaataaaaaccattacaaataatatgataactgctattgtaaccagaaaggggtcacaatccagacccccaagagggtgcttggatctcacgcaagaaagaattcagggcgagtgcacaccgcaaagcaaaagcaagttcattaagaaagtaaaggaatgaaagaatggctactccataagcagagcagcccaaggactgctggttgcccatttttatgtttatctattgattacatccttaacaagggggtggattattcatgagttttccaaaaagggtggacagttcccggaactgagggtttatgccccttttagaccatatagagtaacttcctgacattgccatggcatttgtaaactgtcatggcactggtgggtgtctcttagcatgctaatgtattataattagtgtatagtgagccagtgaggacaaccagaggtcagtctcatagccatcttggttttggtggggtttggccagcttctttactgaagcctgttttatcaccaaggtccaccccagtaggtctcagccttattttacccagtccctattcatgatggggttgccctgttcaaatgcctctgacactgtgaaagaattatgtgaaagagactgccttgccttcctagggagcactgggaaggcagcacagaagaaacaatcattgaaaaataaaggaaaatttgccacaagaatgaagaaaggaaagtgttacagagtcaaatggaatcgtatatgcaaataatggaggcatacatagcatggcacacttgatgactgcagaaagttaagatggcaagtgttagctgttccagaaaataacaagaaaggtggctagaaatgttgaagaactttaagtaccttgcagaggaatttagactttaacctataagtgatgagggagaaattacataataggatttgaatggagaaagctctctcttgtagcaaagctgcaagccaagagatcctgaatcctgcattggaatagaaaaattatcaagcaagtatttggggtagtagttcaatcatatgtatagccttaggcagatgattactttctctaaatcttagttttcaaatctacaattcattctaggggttagcaaactttttctatgaaggcttagataataagtgtgttatgctttgagggccatacagactatattgcaactacacaactctgccgttgtaaacaacagcagccacacacaatacataaacaaatgataatggctatattataattaaactttatagacaccaaaattttatttttttatacaattttcacgtgccatgaaatactattcttttgtttaggcacaacatctaaaaatgtaaaagcctttcttagctcaaaagtcaaacaaaaacaggtggcagggcagatttggccttgtggactgtagtttgctcacttgatctgtcgtatcattataatatgtaatattgggataattagagtgcctacttggtgggggcattataaaataatataaagtaagcgccttaacaaagcatgcagtataggatcaatcaagataagaagtatcaatggcattaaatagaaagttactcaaggtgtcagaagtgaaggagattgagacagattgggcagggaaatatcagtgagaaggaggtgactggtttaggacaaagattctgactaaagtgagaatatcaagtaccgtacagacattgaaattttgagcagaaatgaataagaatattaaggtgagaatggaggcagggagaataatttagaaagttgttgaaatgttcgaggaaagaaatgatgagaacttgaactaaggtactggatgtgatggtcaccacctcacttggactgtgggcagctggtgttgccagacctacctcgctggcctgctttgatgtagctgagatgccaggtcaggtctcaaatgatcatctatgcaccaaacagcagctctggcctcagtccagtctcttttccctgtgcctgccatcagaagtgagggtctaatcccagatcctctccctcaagagaactgtgccagaagagacacattcttcagctggtcacatcagaggttactgaacatgaacacaattgcttctttagtttgtattctttagtccagctaaacagagcaatctcagaaagaagcaactcagcagttagcatttaataagtaatacatagctacttttgttttctttaaacaatatgtgctccacatttgtttgtatttcttgtctcttctccgagatagtcacatccagaactttcaaaactttcctattcatgatctctcttgaatgattcaaagataattaaggggcataaaatattgttcaatttgaacatgagttttcattatatgagacacctaatgagggaaaaaatgatcacactaaatgtcattttttattaaagaaaaaactaggaacttatgctaggatttcttgtcaaaatatgcagtccattcttcttgtcatccactttttgctcctaccacaaagcaaaaagaaaagcagaagcacatttccagacacaaagccacaatagttctctaagaaccagaaacaagataaaaactcaaagcagggaaatgggctgaagtaatgggccctctgtgctctgggtctggaaaagacactattgagtctgggccccaatatagtcagaaggactgaaatgctccacgctagacagggcacagagccagcctctctgcttacagcaaagattcttcctgtttgacaaacaaacaaacaaacaaacaaacaaaaacatacataaagacctgaggatgcaggagacacatattcatcttactaccgaggtccaaggctagttactctctgactcagtgaatgaatctatagtgataaccactatatcatccacaatattaagaatggcaaaataatgtcatatgtcttgctgtagactgggtgctttggtgggctgagaggatgcaatggcttaattatttttaaaagcaaggcataataagagagaaatggggagatgaaaaagcatcaaatgagcccagagcctgtgtctcaaaacacatgaagaacttatgctaaaaaagatagatatcaaaacaacgataacagttcagattatattttaaatagcaatttaacaaaaatttaattatgtttataatgttcaaggacataaatgtaagaaccacctccagtttttgaaaccagggaattagtgggaaaaaaaattggcagaaatagtgcagtgctgtgcctacagttccacctaatcaggaggctgaggcaggaggatcccttgattccaggagttcaaatcaaggctggacaacatgatgtgaccctatctcaaaaaaaatttgcagaaataaaataaaaacatatagaataaacatgaataaattaaaatttttataaatgaaaacataattatttaaattaatttaaaatttaatgcatcaaactaggtaaaattaatttgattgattaaatttaaagtttactaattgaaaagcttcagtagataggacaaattctatactgataaaagttataaagagctagtaaattggaagataataccatgcaatttgcctcataatatagcacagtgaggcaattcacaggcatggaagtgggagaggctctagctaagaaggcttaagaattcatgaaaaagaaggagggaatggtgggcacaatatttggagagatgattatgagaatttccaagacttgaaaaatgacatgaattcacagactgacagagcattccaactaagtacctaatagagtaattcaaaactaaaactacgcctaaatatataatgctatattattgttattatatatcatcagattactaaggctgaatgaaaatagataaataagcttgaaaggtacaagagaaaaaaagcgaagtatctacaaaggaatgactattctactgacagaagtcttcccttctgcaataactggtgaaagaaaacaaaaaaacaacatcttcaaagtactgaggaaaatacctgtctacctagaattttatacccagatacatcaagaataaaccacattaagaataaagataaaataaagaaatcttctaatatacaaaccctagagaacttaacacctatagctctgagttaaagaactgttaatagatagatttcagcaagaaaaaaggtgaatctagaggaaagtccaggacacaattttaaaaaatgacaatgggaatatggtatatgacaaagattgtgttacaaattagcaggagaagatggaaaaagaaccccaaaacaggcaaaagaatttaacaattctaagaaaaggaaagctgattgaccaaaaaacataagaaaaaatcattaatctccatgagcaggaaattaaaacaaagagataacatttcacacacctcagagtggcaaaaattaaaaagactgatatcagcgaaagttggaaaatgatatggagaaagaggaactatcatacactgctaatagatatgtaaattgccctaatctatttctaatctaattagaaaactttctgaggctagactatctgacacagatgatgtgtagacccttctattcaggattttcaacctaaggcgacatgccgcaaacatttattgcagcattatttgtaagagtgaatgattaaaagcaattactctactaaaagaataacaggtatattgtgtaggttatatagttgcaaaacggacactaaaataaaatttttagacgttcttgtatcaagagtgataaatcttaaaacaatgttaggcaataaaaacaagctgcaggatagttatgataatttacataataatttaaaacatgaaacaatgttggatgcttacaaatatataagtttaaaaaacatgcatgagaagataaataccagattcagagtaataatttacttctggtcatggtgggaaaagaatggggtttgggtaagttacaggggggaatttcaaatatattttctaatactttatttatttgaaaaattaaaacatctgtggacaagaaagtaatgaacaaagatattaagtgattcaccttgtccaacaactccatttctctgtccagtccaggctggtcataagaaaaaaagggaagtacaatggagtgactgacagggcaaggactatcagcttagattaggatttaaccttgtcatcactgaaatacctgttagtaactatagctctagttcataccacaccacttaatttctaaaaagaaagacaatgagagaagtcactggagagatagtaaaatatttttagactatacgtttgagttcttctaaaaacagtaattcttgaattgaatactcctcagtgatgcttagacatcaacaggatttactgctgacctgggtcatttacactgaagctgagggaaacataaaaaaaacatacaagcaagcattttaagacattctcttagtttaaagtttaagtagcttgttgcagaaaaaaaattggaaaataaaatatctgttctctaatcctcctgtctgtcttgaatttcaaagtttgaccgtggctttgatgtgcagacttcgtgcctcagggcatgaaagattgagtgcccttctaacttctcttttcagtagaagaaaccctgatgaggatgtgaaacaggactgcagcagtgaaggagttactgctccgtggctactttttctgtctcctttcattttagttctcttagggtcagagtcaatagctggatctggtagactccatgggttagtaaattaggctgggttgaaaaaaagaacttgaagcagttcaaaacttctttgggagttttgaactcaaaacagagttttcaagggttggttgattggttgacatggtacgtaagtgagttagtgagttcattcagaaatgttaccttcatgtaggaagactagggatgagacaaagataaaattcaaaccttttaaccagactatagcacatagtctacagtgacatgatcataaaatatactggagtctgaaggtcttcctaacttttttgtagatgctgtttttcagaaaactccaggaaaaatcaaagcatgaacatgtagcttcaattatttctgggtttcttaaagtcaaaaacaaagatagattaagaacctgagcaacaaaataaaatacattcagctacagattgagacatactagatcctcaatagttatttattgaatgaactaagtcaaatttggagttctcatgttattgaaattgaaattttttaaatgtaaagtttaaactaaggacatttctttaggtcagcctatagatgatgtccaagaattctctcaattctaaaagtgtgaatcaaaaatttttttttctgtcaacctaaaatcgtcaaaagggtcagaatctcatttaaagagagttttatcaagcacaaagtgtgaggctggaccacctggaaacaccaactccaaaagaattcagtcagtgctctgaagtagtgaaattgggatctcatttctataggcagaaacagagaagattttatcaggattacaaaaaaattattcatataaggatggcacctggttacagaaatttcattgattataagcagtgtttcttttggggaagggtacatttaacatttttttacacagagtgtaatagttatttataggttttctgtcatccagcctaagcaaagcaggacaagaaaggggggaagttaatctacaacatgggtcattaattaagaaggcaggagatttttgtccctgacatcatttaattccctctagtcactgcacagaacaagaaaaatgaagtgagttaatctgtaatttgagaacagaagttataactatatgtgactcagatcacagttacgtcttttggggttccaacagcttttaaattttacttatgttcatttttcttttctttttttgttttttttttttttttttttttgagatttcactcttgttgcccaggctggggtgcaatggcgggatctctgctcttggcaacctctgcctcccaggttcaagtgattctcctgcctcagcctccccagcagctgggattacaggcgtgtgtcaccacacctggctaattttctatttttagtagagacagggtttctccatgttggtcaggctggtctcaaactcccgacctcaggtgatccacccgccttgaccttccacaatgctggaattacaggtgaccccaaaccaaattatttaacatatcttcttaataaaattcatacaggtaaaatctgtttaatagcttctttagaaaggtgcaaaatgcattatttacaagaattttgcaggagagtgggagggggaggagaggcaggcatatatcgatcatggattttaaaaaatgagtatttttaaagttttccagtgaatgaactactcaagcaaaatagaaatgttttctttaaatttctacagaaagagtggtttgataaacaccacaaaacatatgttttacaacattggacagtttaaaattttatacttcatatggaaaaataagtgctatgttcacaggaagaaataaatgatcatataactatcattggtctgagccaaaatttattttctgttactggtctgttactgatatcaaatttcctttgcatgagaaaaagaaaaataaactaggaatctggagatacagactgtcatgtacttgttaaattaccttggacaagtaatttagtctgtgagtcatcattatatttataggtgggatggagatattttatttgctcttcctagatctcaggactgttgcaaaaggaaaaataaatgtaaaagttcttcaaaaagcagaaagcaccatataaaatgtactttattaattactgctaagaacattcaattcatggttactgaggagtttagtgcccacagacagtgaaaattatgcgtgaatttctggtaggtgtaatccttgcttaattcaagtattgatatcggcctttctctctcctctttcttttccctttctccatttacttcacttctgtagaacctctacctgtaaccagtgtttccatatatgactataaaccttctcctgaaacaggagtcctgtttgaaatacattatccagaaaaatataacgttttcacaagagtgaacattagctactgggaaggtaaagacttccggacaatgctatataaaggtaagcagcaaaaggaaagctgaatcaatgatgaccctcactttttacaaagcttttcccaaatgatgttctctcttactgcaaagaggttttataattcactatttgacctataaatgagccattaaaaataattattgatttatgaaaatcgtgttatgaggaagcctagaacatctggttcattacttgagagtcgtgtgtcatgtgttcagcatgagaaatactctcattattgtcacttacatgttactcttccctaaggcagcatgcctggtgcaggaaataaattcagacttaagtttagaagcacaagtaaccgtttctttctgggtatgatagatgggcatttctgggactgggaagtcagagtggtgccttttgcaaagtttcacttggagatgatccaacatcctcaaatgcaatgctgtatgaccagctaaatgcatacattaacatacaaaaattagtttcgctttttcactggcttgatgggaaccttgaggggaagggagagaaaagagcccaggagaagtaatatttcaaattactcaaaggaacaaaatcaacttctctgggtggaaggggctagagggagagggaagagagggcattcagtttcatttgggagtgaatcctagtgaaggaacttgaatacgctcagggcacatcgggtgggggtgggaggtaggtaatgatatcagagttggctgactgtaactggaaacatgtattggtggaaagagaaagtattgaagcacacagagcatgacatccaggaaaatgtcattttcacttgctgcttttacacactcatttcttcaatggatttagtttttctgagacactatttaaaatatatgcagtggggctgggagtggtggctcacgcctgtaatcccagcactttgggaggccgaggtgggcagatcacttgcgttcaggagtttgagaccagcctggctaacatggtgaaacaccgtctctactaaaacatacaaaaaatctagccgggcgtggtggcgggcgcctgtagtcccagatactcaggaggctgaggcaggagaatcccttgaacccaggaggcagaggttgcagtgagcctaaatcacatgactgcactccagcctgggcaacagagcaaggccccatctcaaaatgaatgaatgaatgaatgaatgaaatatatgcagtgaatttggtttttttaaactttgaaaaaatcaaagaaacacaaattccacaaagtattatgttctttatttacaatgaaaacataatctgcaaattaataaatggaaagttatttgtttatagatcacatgcaaatatatttatgaatgattaaaaagcaattactgaaacttttgttaacaatcataaattttaaaataattaatataatcccattcttaagtcaattactttttcaaactatttttagatttcaattcaataagtggtacttttagttttgttctctcatttcttttgagttggattggatttttagtttattgttattctctttaaagttttctaagtggaatccaaacttttattatttctttttttgggcaggttctgtctgcaaactggcaaataaaccagttttaaattaggctagtttttctaaatgaaaacttttcttggaaaattgctctttttttaggtcataaggtggcaaaataccttggatttttatcttaaagtaaatggccagtgtaaacttaacctctacaatttctttatattatctccttcaattaatacataccccaaaagttcctatcacaaaaaggttaactccaattgtgtttgatctgcttaggaattttgtcagaaaaagcccttcaggattgagtctagacattcaacgtttcatctctagccttctactaactctttattactgcccataacagtagttgaaggaaatattattttgtgaatgtttagccataattgtttcaaactttccagaagtgtgtgatgtttagaagaccatatttttcatgtaattgattttctcttcacagatttctttaagggaaaaacagtatttaatcactggctgccaggaatgtgttatagtaatatcacctttcagctggtatctgaggcaacttttaataaaagtacccttgttgagtacagtggtgtcagtcacgaacccaaacagcacagaactggtaagtctcctgaagaatcaaatacagtgaaaaaataattcagttatattttgctgtacatttattttttatcctaagaaatattctgatccagagcaaagaaagaaaatatatatgtttaataacctaaaacagattttctatcaatataaaaagaactgggcaaaatattcaataagaaaaatctaaaatatgtcaatgtaatcatagatttctaatctttgaataaaaagctactatactattaccaaaggttataattaactgacttacccagatctagtagacatcagttattgctgacaagtgaccctatggcagaaaacagagtgaagacattctagtacagattatcagattattaaaggaaaatattgaaattcaaatgtatctaaaacttgcggtgcttgattttagtagcaccactaatatgaagcactattgtaggatggatggatagttgcatggatggatggatagatggatgggtggatggatggatggatggatggatggatggatggatggaataatgaatggataaaataagcatatatctactaagtacccatcaccaatataagcaaaatcgtatgtgcctagtatgcctgaatactcaataggaatgctggagaggccattctgatgagcatcaggaagggattatgatagattacttctaaggtcttgacaatttgaaattctaagatgtcatgattcttattcattagtctaagaccaggaaactatttcagctaaatcactaattcacctaatgtcaacagttaagattctatttatgtttttcattattcaatgtaagtagaaaaacattaattgagcaccttctacctggaagttgttctcagtactgagacatgaagacaaagactgatgagacaggatccttgtgctcaaaaattggtactcataatacacgaatggcactaacacaaggcagaatgagataaatattataacagaggtacaaagttatttaacaacacaaaggaaggagagataaatttttattagaagctcatggggcctagcacggtggctcatgcctgtaatcccagcactttgggaggccgaggcaggtggatcacctgaggtcaggagtttgagaccagcctagccaacgtggtgaaaccccatctctactaagaatacaaatattagctgggcatggtggctggtgcctgtaatcccagctactcgggagactgaggcaggagaactgcttgaacccaggaggcggaggttgcagtgagccgagaccacgtcattgcactctagcctgggcaacagagagagatactgtctcaaaataaaaattaacaaaaaagttcatggaagaggtgataatggaactgctatttgaagaacaagtagaaactgttacaggcagagactacgcagtgcgtcttcataattttctccctgtaagtaaagtgtgcttccataatttgtaaactcattttgagtttatatgtttcattttagggaggtgaggagtgaagctatatttctaacatgtgtgttaacatctctaaaggcaacacatgtatgcaactcttgtaggtgcaactatgtcacatggagtattttcatcttcatagctataagtacactatacttgttttgttttggtttttttgtaataaaaatccaggaacagagatacatttttttgtaagtggaattacgataaactgaaaaatatttatatactctgcttttagaagtggttgaattaccacttcaacaagcataatattgtaagttaatatatttgaagtgtgactagtggtatgttgataggtatacatcatccacaaaatgttagaagtatgtatatggaaaaaaacacagcttatcttgatgtaaatttgtctgtgtatcagaagtaaaattaaattccacttttaaaaatctgcttgtgtacctgactcattaagagattaagtattcactctaattgaattaaaaaatacttgaaaatgaaaattctctctcttacagccccttatccacctcaaaatatttccgttcgtatcgtaaacttgaacaaaaacaactgggaagaacagagtggcaatttcccagaagaatccttcatgagatcacaagatacaataggaaaagaaaaactcttccattttacagaagaaacccctgaaattccctcgggcaacatttcttccggttggcctgattttaatagcagtgactatgaaactacgtctcagccatattggtgggacagtgcatctgcagctcctgaaagtgaagatgaatttgtcagcgtacttcccatggaatacgaaaataacagtacactcagtgagacagagaagtcaacatcaggctctttctcctttttccctgtgcaaatgatattgacctggttaccacccaaaccacccactgcttttgatgggttccatatccatattgaacgagaaggtaaagcagtaggaaatcagaggaaataagaactgatacaaaggaaggggaattgaaatgtttttaaatttgagtttagaaagactgatcatagacagttattagtcaaagaataatggtaatgaaaggggagaatttaattgagtatccaatgcagactgagagcagaaaacccaaatgaatagactggataagaatcagaaggtttgggtgattcacaagttgtaagtactgccaactgtatacatttgactgcccactatttctcatgtctcagaacaatgaggaaaacatcatatttggaaatattttgaattaaagatctaactatcccagaatgttacaacataacctagagaaattttctgttttctcatatgcaaatttttaaacatggcagcaaagtaatacttatgaaaacattactacttcctcaagaatatgaggcatgtgtcctgctaaccagccgctcttgttccctttagggtgcgcccctctagaaaaagcaccacagttttccaaagagaagctgatagtaaaatggaaaatacacagctgctgacatttccatatagctactatattatattttgcattgactaactcagcatctgaggttcattctttatattttagccactaacttaggaaagtagagccatgactttcaacaagtttgggtcatgatacctatctcaattgttgtttggtagatttttatggttatttgttgtttgtttagtttttacagtaatatacttcattttccattttctgatctagtagtttgagtggcagaggttataatttgtaaaaatttgaagttacagtgatagccttatttttagggtgagagtttaaggcccatgtagtctcatatactgacatattgtttactcctattttacttaatagcatgagatacaaaatctgtggattcttctatacaagatgatacagcattcaaccatacccaaatattacataaaatgaaaattcttaattatttgagtcaaaagtcattttcctggaatttcctattttttttaaagtttccttaatctatcatttatttttctgttcctaaatatgttcctacggcaaataggatcttgtcattacaaaaattttttactgcctcttctcatgaaggttctattatgcatttatctgactcagtgtcttcttttgaaggctgttgtagtcaccaactgatgataatgacttcaaatgaagtaataagcagcagaggatggatggactgtgaagcaatgtgaaataattctttctttaagaagatctgaaagcaaatggataaaggaaaaatattaccatgattattatttttttaattttactttaagttcaggggtacatcagaaaatataccttaaaaattagatgtattttaaataaatgttaaagcacttctggatggttaatactaccacaaagaacttacaagatatttgatcctggttattttttagcccttacctcgtgatgagaaagccaacaattgttaacttttcctgattatctacttctattttgtacacataattttgttgggtaggagtacataaagatacacagtgtagacccatccctagttttattgatttgaatgccgtatttgagttttgttatttggaagactgtaaaaatactgaactcttatttattattctttaatggtacctttagtttagaggtgtaattgaacttgacaaaaggagggaacatttaaaacacctaattttttttcattaatcgacttgtctatacccagggcctttccaggtgtctattcatgtatcttctcttttttatatatgatttagagaactttactgaatatttgatggtggatgaagaagcacatgaatttgttgcagaactgaaggaacctgggaaatataagttatctgtgacaacctttagttcctcaggatcttgtgaaactcgaaaaagtcagtcagcaaaatcactcagcttttatatcagtaagtaacaaagagatcattttacacttactggggagctagaacaatggaactggtgggattaatgatgctcagatgtcaattattcacaaaccttagggatgatgagaagtcttcaagatcaggagaggctgagatccacaagctttggatagcagaggaaatgaatgcttgtttaatagtagcaatcctatccaggggtttaacttgaggattttttttttactattgtgataattgaacatttattaaactgacctttcacattagccataacaaagcctccaaggatgtggacatacagtttgggaaatacgacatttgtttgagcccataacgaaatgatattataggactgtgaaaaatctcattagagtattgagcttgtgaggctcaaaagaaagacaaagattcaagtgtgggtacaccccgatggtctcaataaaactggtgggaaaagtcatagctagagcaacctgaaagtcccagtgtcaagtcctagggtggcctctaccattccataagggtaacaggacagcaaaagctagcctctgaaggttgcacaaacagtgcctgcctctataacgtgtttagctaaactgactatgtttactggaagtatagaggtcaaaaatcagtaacctaccctatcaggagttatatgtgcctccgatcagtagaaagaaaaaccagaaggcaaagaataaaaattgctttcagaaaaggataaccaccacatatcctattgccatctggaaaggcaaataccacctttcgttgaaggacggatgagagcagaagaggagctcagcttatgtagcagcttaaaaatgttgaaaatatcccatataatatttttacttaaaagaaaaaccaaaaatgtcacctctggcaaaagaaaggccttaaagatttatcagatgcgtagaaagggtattcccaactgccttgtgtgtctttcaagtgtgagagaccttggacatgtgattacttaagaaagaggacaaagtcgagtatttcattcttcccataagactaaaaatgcctcacttaccaaatagtttctttctgcaccagtacagatccaccgcacatgtgaacagcctccacgaaaactccacaacaattctggtctttctgacttttctcttctctgaattcctattctgtctcatagtagacagcacaaaacacataacttattagtgtgtggtatttttctagatttattttatgtacatcttgcttctcatgtcaagttgtaaaatcccaggctggagttatactgtttgcatatttattcattcttttgtacattcaagaaatatttatggaaccacttatatctttcatgcactctgctctattcttagagtatctaaagcgactagtgccattgagaatatgtcggaattgctcaaaaatgcaattactttaaagagatgcatcttaatatttatctagaaaaatataggctcctagaagttttgttttttctctgttgctaaaagaatgactttttaaggagattctgttctgtggtaatgagctattcagatgtaccatgtatacttctttggtttaaaaaatggataccgcagacataaatacttacacctaactgggtaaatgagcaaaaattagggtggcttacgtttgctcagcataatgtagtcacacaccagcaaaagtatatttgcagcctgtttttcctgaccaaactgtttcacatattctggtgttgagctgttacattacaatttattatatgtttatgtcgttgcattataatttacatttatgtagctttgaatgccttcccagagatgagaattcaggtaggaatttgcactagactgccaatagccttatgaagaaaacacttttattacccccatttttcacattaaaatacatactgaatcgcagaaatttcagtgacttccccaagtgtcaaaattaagattataactcaggaatatttgataacaaaacccattttcatttagcctgccatgacccatgtccttgggttgattatcaagtcagtcataaggtaaaactattaaataattgaatttgttttgcttactccaacctccaccctctgtgcccccactacactagtactcttcagaacagtagtaacacttcacgtttatgtagttctctaacacatattatctcatttgatcccaacaacaaccttatgaggtaaattaatcagattttcaaaagcaatgactcaagagacaggaggtctgggttaggtcacaagcacttactagctctatgacttcaggcagcttgtttatatctctgggcctcagtttcctcatcagcaaatgtgttagtccatatttacactactataaagaactacttgagactgagtaatttacaaaggaaagaggtttaatcgactcacagttctgcatggccagggaggtctcaggaaacttacaatcatggcagaagacgaaggggaagcaagcaccttattcagagggtggcaggacagagagagagagcaggggaaactgccacttttaaaccattagatctcatgagaactcgctcattgtcttgagaacagcataggggaaaccacctccatgatccaattacctcccatcaggtccctccctcgacaagtggggattacaattcgagatgatatttgagtggggacacagagccaaaccatatcagcaaaataaagcagtgggtctctaaagttctcttcaattctaaaattccatgatttatccatttcacagatgcaatgactgagattcagagaggttaactcatttgtccaaagttgcaccactaataatgaccaaactgagtcttagtgcaattatcgtatctccaaatttttactatttcatagtgctccaggaagtctcatgcagggttgagagcatggattttggaatcagacttcctgtgtgtgaatcctagctctacttactctatctctacctcagttttcacatctgaaaagtgagatttaataaaagtacttatttcattggcttgttataaaagttaaaggggccaggcacggtggctcacacctataaccccagcacttagggaggccaaggcgggcggatcacctgaggtcaggagttcaagactagcctggccaacatggtgaaatcttctctctactaaaagtacgaatattagccaggcatagtggtgggcacctgtaatcccagctactcgggaggctgaggcaggagaatcgcttgaactcaggaggtggaggttgcagtgagcctagataaggctgcactccagcctgggtgacagagtgagactccatctcaaaataaataaataaataaataaataaataaataaataaataaggaatgaaatacgtaacacataaaaacttaaagaaggttatatgctaaaaaacagtttacatgctgaaaagcagtttatatgtgagcatccgtgttttaagctcaaccactactgtgatgtcctagacatcttcccaagagaactacggtagcatccttgtgtctgtggtgtcactgacctgccaggaacaaacctataaatatgtaatgggttccatatctctttactataattactatcattttgtattatcatttcccttgcaccatttacaccaaaccttagtctgtcctccccagtagagcgacttgctccttttcctctcctggatctcagcttaggaatacagcatcaaattaaggagctgagaatgcatcctaagcaaataaatggaagtttcacatttgcatttcagcagggaatttctgtagataataatcaccttaacatgtcttgagtccttactaggtgtcaggcactgtgttaagaaccactttaggaacataagagaacaaagctaaggatgggcacttctgtggagacattttatggtaaggatcctgttgtgttcctcaaattatcacccaggttttagccagcttctttaattgagccagcctgttgtgtgtttcttctctaatataatcacagcctgccttttcgttctcactgttgccaaattcaaatgtttgcacagggtagtagtcgaggctgatttgaatctcaaagtaattattcctagagatcaaagatcctagtagcaaaggaataataagccctgatgaaatgccacattgccacgctcactctttgttaaaagagaagtaagttttctcaggtgaagaatttaccagaatactctcacatgcacacgatgattgaagtggcacttttgtttctgctgttattgccgaggctgctgtttagatcaaggtgaggtcaaggagtagagggttgcagctgggcagaggacctgaagagttgccagtccgaccgccaatctttctttgaatctcattgtaagggcaaaaagaaaacatgattttttaaaccagaatcttttatctcaatcagtgtaacgtgcagcctcccctgtgttccaatttgaaatgtgcaggtccttcaggagagtggattgaagaactgaccgagaagccgcagcacgtgagtgtccacgttttaagctcaaccactgccttgatgtcctggacatcttcccaagagaactacaacagcaccattgtgtctgtggtgtcgctgacctgccagaaacaaaaggagagccagaggcttgaaaagcagtactgcactcaggtaaaggagaggaaatgagaatgggctcgccggtccttcctaagcacaaccttacagggcaatgccaaggaggcaattgtaggaagccaggctgaggtctgctgggatgggtgtgttctgtgactgttcccaagagccagaggggccagaaatgactggcaatggctttttgatggcactgtcatctccctttctcttcagaggagggtcatgttctttttcattcattattcaagggaatttgctgagcatctatgatgtgccaggttctaagatagatgttggaaatttttaaacatcctgctcttgcagagcttgtaatctaatgagaacaatagataagtgaacatataatgactgcactgtatggaataaggcctcagcttaaaatgaatgatgagagtccagaggagttcacggaagaaggagctgagcgtgagtaacatggatgaaggggaaagaggatttggaaactggttggaaaaaacatcacagagcaggagacaaccaagcagagggttggagggttttttgtttgtttgtttgttttacttttttccattcttttaattttcatttttactgtaaaagtaacgcattcttgctgaaaaaaaaaaaaaacttaaaaatgtaaagaatataaagtaggctgggtgtgggggctcacacctttaatcccagcactttggaaggccgaggcgggtggatcacctgaggtcaggagttcgagaccagcctggccaacatggtgaaaactcgtctctactaaaaatacaaaaattagccaggcgtggtggcacgtgcctgtaatcccagctactcgggaagctgaggcaagagaatcacttgaacccgggaggtgggggttgcagtgagcccactgtactccagcctgggcaacagagtgagactccgtctcaaaaaaaaagaaaaaaaaaaaagaatataaagtaaaaaactaccccctcaccagtcacaactgaaaagagctttgaagaatatatgggagacagctgtgcacagaggagagtgaggggcaggcagagacggtgtgcaactcagtagtcttgtgagtggctagcagaaggaacgcatatgccagaacaaaccctagtgaaactgtgcaactggagcccagagtggaccttgctctcaaatgccctgagaacctggggcccagtcctatatttctaaattctggccttatgtttttacaaggtcaaatgtggtggttcttggtgtcttacaaacacattttcttccctaaaggcaaaaggaaaaaaataattatcaattcttgtggagtacgttggaaatgtaatgcacagaaaagatgtttgctgtatgacagcaatttgggatgtttccattcctcccaggaaaattaagcatttaatgaaattcaaacaatgataaattgtaaattgataagatgaattcaggaatcgtgttctttggagcactagaaagccatagaatgcttgagaatgaggtgccccttgagttgaattaaattaaggaataaatatgctaaaccgattaactagtaatcacagttcattgtgtaacttattagcttcctttcctgagcatacccaagatgactgactcattacattgacagaaaaacgtgttttcccctacagaccttgacctagaactcaactgcttcaaggtacatttctccccttgccctacttaatgtacacattatatatctttcacataagaataaaaaggctaaaggtagagatagatattgtaaattatcaatgagccagaaaagactagtccaaatgtacttttacaatatcttctcaaaatgcaaataggaaaacagaacatgaaatgtcctattcaggattataagcaagaagaccaatatttaaaggggagtgcaggaaagagaccaccatgctaggcatcatctcagttaccacaagacctttttgagatttgtataatatcataccactatagtccattatgccactaaataaatgtgtagaaaagcaccaatggaaagaagattacataaagtggaaataagaccatctcaggctcaaaggaacctacactatcatctagttcaaccctattatttaagagtccatcatatacaggtgcagtggctcatgcctgtaatcccagcactttgggaagctaaggtgggcagatcacttgagctcagaagttcgagaccagcctgggtaacatagtgaaactctgtctccacaaaaaaaaaaaaaaaaaaattgcctatcatgtacttacttcaattagctatgctgtctagtacatttttctccttattcctttagctgaagaggaatagaactggtatccatttggagggacattggactcaactaaattctcaggaatgaagattaagacagtcaggaaaaatattgggatgctaaatgagtggaaattaagggggagcagagtgtggaagtattttgtaaaaaataaaacacattacttaacatgcagaatgcagaggcattccacttttcctcctccaacacacacccaaggaggtccaggagaaataaaaaggcatggagaaacatagaagtgtaaatataggttagcagctcagtaaatattcagaaattggggaggatggaaattagtgtttttaatttattaccaagtcaggtaatctgtaatccaattacccctttgtcattttttaagtaatatgatgtatatgcccatagctacttcttattttaaaaagtataatatccctaggataaatttattataatggcatatttttgtttgtttgtttgtttgtttatgagacggagtctcgctctgctgccaggctggagcatggagtgcaaagtcatgatcttggctcactgcaacttccgcctcctgggttcaagcgattctcctgccccagcctcccaattagctgggactacaggtgcacaccaccacacccagctaatttttgtatttttagttgagacggggtttcaccatgctgaccaggatgatctcgatctcttgacctcatgatctgcccacctcggccttccaaagtggtgggattacaggcgtgagccaccgtgcccggctataatggcgtatttaaacagctatgattccaggtagtcatttgaatagttagaatcaactcataaaatattatcaaaagaaaggaaccttaacatcaccatgaaacaatctatactccttatgccctttattattctaaacattctaaataggcaaaatgggtgattaatgagctaggtcagcatttacacttatagtcagatgtctacaatgtgttaagtttaaatggagcaatgtttttttgtttgtttgtttttgggggggttattgagatggagtcttgctctgtcacccaggctggagtgcagtggcgtaatctcggctcactgcaacctccacctcccagtttcaagcgattctgttgcctcaacttcccaaggagctgggactacagaagtgagccaccacgcctcactaatttttgtatttttagtagagacgggttttcatcgtgttggtcaggctggtctcaaactcccaacctcaggtgatctgcccaccttggcctcccaaagtgctgggattacaggcgtgagccactgcgcccagcctggagcaatgttgataatataacacattatatggtttaatagcgtattatttatgtgtatatgttagaagaaggtctagaagaaggcatatcaaaatgtcaggatttgtgggaggaggagaacaaacaaaacttccaatttacttcatttgttcttttattgggtgagcaatttttacaataagcatatatgttgtatcatataaagtgtattttaaataaataaaataatattgcttagttgtggataatatgcatcttcttatcatagtttgtctctttagaaaattctctatcaggccaggcacggcggttcacgcctgtaatcctagcactttgggaggccaaggcaggagaggcacttgaggccaggagtttgagaccagcctgaccaacataatgaaaccctgtctctactagaaacacaaaaataagctgagcatgatggcacacacatgtaattccagctacttgggtagctgaagcacaagaatcacgtgaacccaggaggcagaggttgcagtgagccaagatcgtgccactgcactccaggttgggcaacacagtgacagagcaagactatgtctcaaaaagaaagaaaagagaagaaagaaagaaagagagagagaggaaggaaggaaggagaaagagaaagaaggaaagaaagaaagaaagaaagaagaaagaaagaaagaaaggaaggaaggaaggaaggaaggaaggaaggaagaaagaaagaaagaaaaagaaagaaagaaagaaagaaagaaagaaagaaagaaagaaagaaagaaagaaagaaagaaagaaagaaaagaaagaaagagggagggagggagagagggagggggaaggaaggagggagggagggaaggaaggaaggaaggaagggaaactctctatcagatgaagagatatagttgactaaatctgcctatacggcttccagcagaattaaaaatctaaaacttgtgcaagaaaccctgatatgaaagagtataaatatgaaagaaagaatgaaaatcccaatttattaattcaatataatcttattttgtttaagtcagtgggaaataaattttggtatatggctccttttacttacatgcagaggaagttgtaccaattcagattacataatttctactgtgtataatcagtttccagtgcgaaaaggtttaaaattcatatcatatcaccagttctgtatgaatccttaaaatcttaatgggactctaaaaaacaccttacagcatagataagctgtaaacaacattgttctccattgattcatgttcctccttggagtaattccacaattttatgtatccaaaaggccaaaaagttaataagatgaataaagattaatatttattgatactctggtttaaacattctcaaactctatgaggtatataattttattacctatatcttagcaatgaagtaaccaaggtaagaattttaattaaattataaagcataaataaacccccatgctaataatgagtagagtcaggatttgattccaggtagtccaaaaaaagaatgtgtgttctttccaccaagcaatactgtcttaaatattagagacactgaaggtcaaagcagcaccttaaccttttagttgaattatcaattcttgtgtgtgccaacattcaaatttaataaatgcattttattcatctatacgttctcactatttttctctatatggtatttgttacgtatccaaattttttttaaaaaaagcagggccaagtgtggtggctcatgcctgtaatcctagcactttagaaggcccaggcacgtggatcacctgaggtcaggagtccagagaccagcctggccaacatggcgaaacctcgtctctactaaaaatacaaaaattagctgggcgtggtggcccacaactgtaatcccagctactcaggagcctgaggcaggagaaatgcttgaacccgggaggtggaggttgcagtgagcccagatcatgccacttcactccagcctgggcgacagagtaagactctgtctcaaaaaaaaaaaaaaaaaaaaaagaaagaacagtaaagaaggtctcatgtaaatgagaaatgttctctacaatattattttagggggctacaacagcctggcagggtgcttaccaggatatctcgatgcttagcacagtgacttgcccatagtgtagattaaaggtcccaacactaggcttccagtcccaacactgcatctaaatatatgaccttggccattctctggctttactttatttattaaatgagcactttggactaggtaatctctaaggtcatttccatttatttatttatttattttatttattttttatttttgtttttttgagagcttgtctcactctgttgcccaggctggagtgcagtggcacaaactcggctcactgcacctctgcctcctgggttcaagcaattctcctacctcagcctcctgagtagctgagattacaggcacctgccaccatgcctggctaattttctttgtattttagtagagacagggtttcactatgttcgtcaggctggtcttgaactcctgacttcaaatgatctgcctgccttggcctcccaaagtgctgggattacacgcgtgagccactgttcccggtggtcattttcatttctataattagatattatatgcttctaagtgacaagagactaaagacatttccgtactgacctttgtatgtaatcagctgacaccacaatttagaatgtcaaactatcctcatggtattgctgatttgattatggttagaggctgatgtgtctctagtgtgcatagttataattgacactgatgggtataaagcagttcacagggcttagaacagacaaaatttgaatcttctaggttcccttcaatgttcacataaactataaatcatcctaattttggaatctgacagcttcagtaaagccttctggatttcaaagtcatctgtgattccaaaaagagtctctgaatattataccagcctctgtgtaacattctgaaatcccagctctaaataaatcttattgggtgtttggtttaaaggtgaactcaagcaaacctattattgaaaatctggttcctggtgcccagtaccaggttgtaatatacctaaggaaaggccctttgattggaccaccttcagatcctgtgacatttgctattggtaagttgctagccacaagaagaatgactgacctatatattagggtattgacggaggggtgcaatgtgcgagctcaaatcattatcatcgtatttggaaggtccatattagttcatccaatatgctaccttcagagtaataaataacaagaattgtatacttggaaaacattcttaatatttattacttggggaaaaaatcagaggcaaacattcttactttagttttcaatgattatacaacaagagtaaagctgtgtgccgtggcacacacctacagttccagctacttgggaggctgaggtgggaggactgcttgagcccagaagttgtttgttttttttgttttgtttgtctggttttttttttgttttgtttttttttttttttggagacagagtctcgctctgtcacccaggttggaatgcagtggtgcaatctcagttccctgcaacttctgcctcccaggttcaagcaattctcctgcctcagcctcctgagcagctgggactacaggtacatgccaccatgcctggctaattttttgtatttttagtagagacggggtttcaccgtgttagccaggatggtctcgatctgacctcgtgatctgcccaccttggcttcccaaagtgctgggattacaggcatgagccaccacacccagccaagcccagaagttttaatctagccttggtaacatagcaagaccctgtctcaaaaaaaaaaaaagaaaagaaagaaaagaagaaagaaagaacgaacgaaagagagagagagagaaagaaagaaagagagaaaggagaaaaagtgagaaagagagtgagaaagaagagagtgagaaagagagagaaaaagaaaaagagagagaaaggaaagaaagaaaagaaagaaagaaagaaaaagaaaagaaaagatgaaaggagggagggagggaagaaggaagggggagggcagggggagggaggaaggaaggggaggaagcaagaaagggaggaaggaaggaaggaaggaaggaagggagggagggaggtaggtattgtatcagagagtgaaaactcgggtcattaagtagaagtttgaggccattgctaagacattccttcttaactttctttttctaccccctgccctcttctttctagttcccacaggaataaaggatttaatgctctatcctttgggtcctacggccgtggttctgagctggaccagaccttatttaggcgtgttcagaaaatacgtggttgaaatgttttatttcaaccctgctacaatgacatcagagtggaccacctactatgaaatagcagcaactgtttccttaactgcatccgtggtaatcttcccttaaccaactgtcagtctttcctatgggaacaggcaaacctttatgtaccaaatgtgtctttaagaaattatctataaatttgattattttgtaaatacacatagtgtgttagttcattttcacactgctgataaagaaatagccaagactgagcaatttacaaaagaaagaagtttaattggacttacagttccacgtggctggggaagcctcacaatcatgacagaaggcaaggaggagcaagtcatgtcttatacagatggcagcaagcaaagagagcttgtgtaggaaaactccctcttataatagccatcagatctcatgagacttattcactatcacaagaacggcatgggagagacctgcccccaggattcagttacttcccacagggtccctcgcacaacacttgggaattcaagatgagatttgggtgagaacacaaccaaaccatattattctgccccttgcccctcccaaatctcatgtcctcacatttcaaaaccaatcatgccttcccaacagtcccgaaaagtcttaactaattaactcgaaagtgcacagtcaaaagtttcatctgagacaaggcaagtcccttctgcctatgagtctgtaaaatcaaaagcaagttagttacttcctagatacactcggggtacaggcattgacacagctgttccaaatgggaaacattgaccaaaacaaagaggctacaggccccatgcaactccaaaatccactgggacagtcaaatctcaaagctccaaaatgatatcctttgactccgtgtctcacatccaggtcatgctgatgcaagaggtgggttcccatggtcttaggcagttccactcctatggctttgcagcatatatcccccctcctggctgcattcacaggctggcattgagtgtctgcagcttttccaggtgcacagtgcaagctgtcagtggatctaccattctggggtctggaggatggtgaccctcttctcacagctccactaggcagtaccccagtagggactctgtgtgcagtctccagccccacatttccttttacattgcctagcagagggcatgaggtccctgccctgctgcagcaaacttttgcctgggcatccaagtgtttccatacattttctgaaatctaggtggaggttcccaaacctcagttcttgactcctgtgcacccacagtctcaacaccacgtggaagctgccaagccttggggcttgcaccctctgaagccaccaagccttggggcttgcaccctctgaagccaccacctgatctctacgttggcccctttcacccacagctgcagcagctgggatgcagggcaccaagtctctaggctgtacacagcacagggaccctgggcctgggccacaaaaccacattttcctcccaggcctccaggcctgtgatgggaggggcttccatgaagatctctgacttgacctggagacattttccccattgtcttggggattaacattcaactcctcattacttattcaaatttctgcagccaacttgaatttctcctcagaaaatgggattttcttttctatcacattgtcaagctgcaaattttccaaacttttatgctctgtttcccttttaaaactgaatgcctttaacagcaccaagtcacctcttgaatgctttgctgcttagaaatttcttctgccagataccctaaatcatctctcttaagttcaaagttccaaaatccctaagggaggcacaaaatgctgccagtgtctttgctaaaacgtaacaagaatcacctttgctccagttcccgacaagttcttcatccccatctgagaccacctcagcctagatttcattgtccatatcattatcagcattttggtcaaagccattcaacaagtctctagggaattccaaactttcccacattttactgtcttctgagccctccaaactgttccagcctctgcctgttacccagttccaaattgcttccacagttctgggtatcttctcagcagcactccactctcggtaccaatttactgtattcattcgtttccatgctgctgacaaagacatacccaagactgggcaatttacaaaagaaggaggtttaattgggcttacagttccacgtggctggggaagccccacaatcatggcgggaggcaaagaggagcaagccatgtcttacatggatggcaccaagcaagagagcttgtgcaggaaaactcccccttacaatagccatcagatttcatgagatttactcactatcatcagaacagcacgggaaagacctgcccccatgattcagttatctcccactgggcccctcccacaacacgtgggaattcaagatgagatttgggtggggacacagccaaaccatatcacataggtatggctattttcaagtttttttcattgtttttgcttttaggttttgggattctcttttgttttgagagggagagaaagagataattgtgtgaagctagctgtcaactctaattgaatgtatttgttaatcaacattttttcctaagcacagaatagagcaatcaagtgcttactgcttctcctggatcctggggaggaacacaaagagatttccctttggcattccatagttagttgacactgcctaattttaatgatgacttttcatggcatctacagatcaattaaatacctctaatgtcaggcttttagaggatgttttttaagaaaacaggtaaaaattgctctttctgaaattgagataattttgaaaagtgtgggttacccatgggctattcacaaagtacacaattaccctctacccagttgaagactctgaaggactcctgttcgtggtttacactgaaaaaacactgagttgtgagaggttacttgtcttagaaatagggagaaatgtatgtacagtcacttataaataaggactgtttcgcatgtgtaatattaggaaattgcaaaatcaaacaaatattggaaatctttggctctatatctttaaatcacttttaaaaatttatatttttgtattttactttatgtctcatttcattctagaaagaatattttattatagtaaatttaggaaacacaaaaagacaatataaaggaaaattaaaattacttattaattttttatgaaagtaagtctactccaaaaatagtactttctcccacagtcttttgtctccttgcttgcttttctcattcagagaatagctaatctgctgccagcatggtactacaacttccgggttaccatggtgacgtggggagatccagaattgagctgctgtgacagctctaccatcagcttcataacaggtgaggcatgtgtggggaacagttccacaaggagagagcattattgtgaggagttaccaaggttccaaatctctagaaagtgccagtcattcacccagcactgggtgagcatcaatttcatgggagataatattgattctgatcattcattattttgtttagttgataatctttagaaatcaaaataccatttttattttgtgttaccaccgttgacttatttttattctgaggcactgaccttgattaatgtactctccggctgggattgattagaatagaaatatggcaggcacagccatcagcttcacactgcacagtcgattgattttacccatatgatgattatatttgttagagtgcctccattttcttattaattaagccatttttaaagtcataggctgactgtagtagggtcccttgtggaaattaaaaaatagggtttagagacaggtagatctggatttgaatagaccctccgcataccacatataaccttgagcacgttaacttttctaaatatgttttttttaatgtggaaaatggggatgataatagtatcagttatctgttattatttattacaacttcattattatataagctactttgcaaaatacacgacacaaagtttaagcacttaaaaaacaattagtcttagatcctcggaaaccttaaattatgtagttgcatcatcagtagtcagagatagcaatgaaaaggggaaattcatcaaagaaacactaacccttgtggtttgaactaagacgtttcaagaaccttttatcgaacgacaaggttgtaattagagttgtcctgagaaaacagaggagaaaaataccgcttagaggaataattttggcaaatagtttcctcagtagacatctagtttactctgttgaaatgtatgagaaaaaaaaaaagtggaaagaaatcaatcatctgtgaattcttacacaattaacttacataagcatgtctcttttctttactagccaatatccagagcactttttgttccagatgttaatagtaatattagagcagaaaactgaaagaatacccaaaaaggagaaaatagcagttacttggcaagcgctgttagtcttttgcctataatgataatcacatatttaattataagtaaacttcactgtatcaataattcttataatttaactatattgatgtaaactttctgagaatgctctttccttctcaccaggacagttgtctggaaaaagctcagatgtaacatctcaacctgggactgctcaattccagctgtcaaactttgaattatcttaacgattctgggcttctattttctcaccggtagaaccccctaaaatgtcagctaaataggcactaaagcctacttagagacaactgattagtagagcaaaacttaatatattgaacaccaccctgacagtctttgcactgtcttttaagggggaacaaaagaaatgaaatattaataggatttggcttcctggctcaagtggtttaaggtatgcctttcaagatggaaaactgactaggattgggcatagtttataacagtttaaatggacatagcaagtgtggatcaataaactatggttaatagacaagctacttacctggtaagcagtctgttgtcaccaatgtattgatgttgatgattttctatcttttcctgggtcaaataaataagtgatgctgaaccagcagtctacaggtattgtctcagcatattgacagagatggtctcaattttcacatctataaaatgggtataataataataaatacataataataaatacctcacagtatgtgtgagaattaaatcatgtaatgtaagtcactattataatagattattgtcttttttatacttattttctaaacatattgaaaattctagtaggttttattttaaccttcttttttttttttttacttttactttaagttctgggatacatgtacagaacatgcagtttgttacataggtatacatgtgccatggtggtttgctgcacctatcaacctgtcatctaggttttaagccccgcatacattaggtatttgtcctaatgctctccctccccttgcccccaccccccgacagttctcatgtgatgctaatacttataacaaacattcataactaggtatgctttcaaaaataatcattcactgaagaatttgtaatatataaagtaaaaacgcgtgtgtgtgtgattttttttaccttcttatttaaagcaaataagaatctcatgcttaactttcctatgctttgaattttccaaattgtgtggtgtaaaagaaaataggaacaaaatatttgaattaggtgtgatttattaggaactcaagtctaccatctttgttaggcaattcagttggctagccctcaatcatagtaattatgcggaggggccaaagtattaataaacaaatagtgacatcttgtggccttccagcaatatgctaggttttaaagcaacaacatggaaataaaaatctgacatgtgagaggaaagatatatacttctgggtttgcaattttaaagatgtttcttttcctcactaaaattaggacatgagaaaataccctttgaagaaatatatgcataggttcttgtatatgacgaaatatgttggaatatattaggaggctataaggaagccaaggttattttcctttagtagaatattctgaaatatgatgtagatttgtgttacttgttagatgcattgatgatctttcaagattttattgctaagcatactatataagtgctactcgtatttcacatgaaacaaatgcatttttacttcatatattacaaattcttcagtgaataattttgaaagcatagctagttatgaatgtttgttgtaagtattagcatcacattaggggaaatgattctttatagaaaatttccatagattttagttgacattgtgctgtatctcagaatggaacaccgactgtcttcaaaccaacatacacctggaatttaaattcaattgtgtatttgttttttaaaataatcagagttagcagttactttaaaaaggtaattaaaatgttttcagagcctatatagtataaagcttgtgatgaattctcttccctcgttggcaaattttttattttatttatttacgttttttggctgggcgtggaagctcacgcctgaaatcccagcactttgggaagccacgatgggtggattgcttgagcccaggagttcaagacaagtctaggcaatatagaaagaccctgtctctacaaaaaatataaaaattagctggatatgaaggcctgtacctgtagtcctagctacttggtagactgaggcaggagggatgattgagcctgggaggtcgaggctgcagtaagctgagattgcgccactgcactccagcttgcgtgacagattgagatcctgcctcaaaagtaaaaataaaataaaataaaagtaatttttttttttgaggcagggtctcactctgtcacccaggctggaatgcagtggcaggctcatgcctcactgcagcctggatctcctgggctcaaatagtcctcccacctcagcctccctagtaggtgggacaacagggtgtgccaccatgcccagctgaatcttctaatttttttgtagagatggggttttgctatgttgcacaggctggtcttgaactggactcaagcgatccacccacctcagcttcccgaaatgcagggattacaggcattccctgcttaaatttttaaaaatttaaatgcataagatgataaagtagcaagctcagtgttagaatttagcttcgtggctaaaaaaaaaaaaaaaaaaaacttgttcttcccttctttctctctctcactactcactcagcaacatttattaagagcctgttttctgcaaagcactgggctagacactgtcaaaaataatgtcttgttattttatgcaaataacatttgtcttctatcctgcttgtagtactatgatcttctatcttcctacccttgtatcctactgttctttattcccataaacacctttgctgcaagtaaatgaaagagacttagtttgcaggactctaagttttttaatcctacttggctaataactccactgatacctattaatattaattggttgatgtaacaaaaatatacccaaacaagtgaactttttaggaattttgtaatggtgacatttatccaaaagactttgatatcctcaggtacagatgggtctgggggtcttgtatcttagatatacaagatgtgggatcccattaaacaagtgcccatcctgtatcaccatccttcactgttattgagaggtcctgaagttaccgggactatcgtgtgctgtgaattctaattcgctaagttgactctatatgggatttcatgctctgctggtaagtactttatttatccatctattatactaaattgtgcctcgtttctcccttgtagccccagtggctccggaaatcacttctgtggaatatttcaacagtctgttatatatcagttggacatatggggatgatacaacggacttgtcccattctagaatgcttcactggatggtggttgcagaaggaaaaaagaaaattaaaaagagtgtatgtttctttgaatgccagcattgtgtgtctgtaaatttagttttatgaactattgaaaaccactaagcaatcatttattgacacgtcaaatgtttgcataccagttgtctgttttaggctctggagataagacagtgaacaaaaattgaattcttcctttcatagagcttaccgtttaatctttaacagtgagatgtaagagctccaactattgatttcatttatatttagaattatgatttgagctttttcttcaggatgccaaacattttcaagaaaactacaattaacgtgtttcccattttttcccatatatcaccgacacctaaagatttggggaccttgggactactgatttcttttctccaaaatacgcttttggatgtttattgataaggggacagactaaactactgtaataaagaaacaaacaaaaagagagtggctcaaacaaaatagaagtttatacctctcccatgatagcacaggactaaccaggcacttctgctttaaggggtcacccagggaggcaaattctgttttgttgttccatctgccactatgcatagtccttgtctctagagaggaagctttatcaccattacatgcatgttccagcctgcaggaaggggaaaagaaaagggatgatgtggaagcccagcacttacaggatgtgaactgaactgtcatttgtccatgtgacttctacttacaatccactgatcagagctgggtcacatcatcccctctagctgtaggagaggatgggaaataacaatggctgttaggtaggaagccacacgtctacagatatgggtaggtttcttttgaacgtcttagaatgtacatatcagtagcaactcagtaattgtcttttctaaaacctgttatcaatatgtgagaaaatgtcagaatgagacccattccaaataagggaattcattgcaaaatttttctgatgtatataatgcattattaaggctacctcacattgggcccagctgaggaatttataaaattttcagaagatataacgtatctataatataatcaattgcagactgctgcatagaacagagagggaatgtgtctgctatagtcctttagttgtttggggtggtgcactgattcattcactaaaagtttaaacccttgattttgatgatcttgcaggtaacacgcaatgtcatgactgcaattctcagcttgcctccaggcgacatctataacctctcagtaactgcttgtactgaaagaggaagtaatacctccatgctccgccttgtcaagctaggtaagaagagtgcacagagatgggtgtgaaataatcactaatgtttgcatcattcgattcagcaagagctcctcaattcaatgaaataataacagaaaaatggctaattttttatgagtagaaaatagacatttgtactagcaaaagggtatgttcaacttggtacaagtttctgtgagtgggttgtatactgttctgggaaacagtggtgttcgctgttctttgtaaggttaaagaaaccaggtagtcataggattttggagatggaagcacattagagattatctaatgcagtgttcacaaccctataagacaacattctattttcatattaatattatgtaatgctctctttaatatcttaaatagtaatggatttaaaaatctacatattgattttttaaattttatatagtttcccaactccagaataaaatcaagacaaaaagaaactaatttataataaaataatatggatttcctaaatatatggtcagacacaactactctaaaagacataatgaaattacctgatgcctagatataattaaaatgaataagttggggtttataagaaataaaaagatcattagtccttcatataagaagtataaaaataagcaaagaaatgaacaagttaatataaattgataacaaataactaaacaagcatagatacaggtagatactagaataaaaactagagttaaaataagtactaaaagatgagatatattttcatataatgagagaaagatggaaataattttaattaaagtagggacaacacaccaaaagtttataaatggcagcatagaagcaagctggcttcactcccctctacccaacagaaaaccaaaagcaaatatacactctgagattttcaccagcaacaacccagaactcaaatacgaggatgcgaccgattccagagccatagagaagtgaaaatactctgggcagatggtaggagaatcaggcttccacattcgtgacgcctcccccgcgattctgcctggcaacaagtgtgcagaaaatcttctgccaactcatgtttctacactggaaaaagtgaggttgaggtagtcaactagtttccccactatcttgggctccctggcaggaaatctgtccttgccttaacccacaggaagcatcgtgactgcctgaagggagaaatagcttgaggataggcagaaacaaagagatgagatggaactaccattcccagtcccagcaactctgctctgtaacttggccaaaggagacaccaaatcagagtggctgttcagcagcaccatactgtaggaggtacatttcacaggtcccttgggcatgagccccccagctaactttgacacactgccaggataattcctttaagacctttctttttcaggacaggcagagccaaggcaaatctggacttaaggtgccacctagagctgaaatgtaggcagtgatctagtggtaaatatttgctaggcaaacatagccaataaaagacaaaacaaggcaaggcagacaaaggaaagtggactaaatagttaattatttaatgcaaagacatagttctatgcccataagaaacaacatcaaacagggaactgtgacccgcccacgctacccaggaaaaggacaaagcaaaaatccaatgactgaccctaacaagatggtgatctgtgagctctctgaacaagaattcaaaatacagtttaaggaaaatcagtgatgtccaggaaaacacagaaaagcaattcagaaatttatcagagaaatttttaaatcaaacaaattcttggtactggaaaatacgtttgctgaactgaaaaacacatcacagcagaatggacaaaggagtggaatgattcagggagctaaaagcctatctgaaaatacaccattggaggagaaaaaagaaaaataagactgaaagtaagtgaagtctgactataagatattaaaaaaaaaaggctgggcacggtggctcacacctgtaatcccagcactttgggaggccaaggcgggcagatcacgaggtcaggagatcaagaccatcctggctaacatggtgaaaccctgtctctaataaaaatacaaaaaaaaaaaaaaaattagccagcatggtggcgggtgcctgtagtcccagctactcgggaggctgaggcaggagaatgatgtgaactcaggaggtggagcttgcagtgagccgagatcgcaccactgcacaccagcctgggtgacagagcaagaatctgtcaaaaaaaaaaaaggtattaaaaaaaccttaaaagatcaaacataagaattattagtattcaagggggagctgaataaggaagtttactgaaagaaataataatagaaaacattccaaaacttgagacaggtacaaatagccaggttcatgagggtctgagaataccaaacagataccactcaaataaaatcaccccaaagcgtataatactcagactctcaaaggtcaaggacaaagagaagatcctgaaagcatcaagagaaaaggagcaaataacaggtaaacaagctgcaattcacctggcaacaaactgtacaggccatgaggaagaacatttttacagtgctcaaagaaaaaaaactgccatccaagaataatgtatccagcaaaattgtccttcaaatatgaaggaaagataaagtatttctcagaaaaacaaaagatgaaagaattcaccactaccagacctgtcatacaagaaatgcaagagagttcttcaatctgagagaaaaagacacatgcgaaaagaaaacttttcaaggtattagacctttgggaaaattaaatgcatggaccaacccaggatattctgttactgtgattgtggtgtacaatccatccataactctggtataaagcccaaaagacaaatcttttaaaaataataatagctacagcaacctgttaagagataggtaatgtaaagcatgtaaattgaggcaacaaagtcaaaattgggtggtggagagagatgaagttaaatttttaggtgtggtagttttgcttttgtttctattcttttgctcatgatctaagataagttgtcatctctctaaagtaacttgttatggccaggcatggtggctcatgcctgtaatccagcactttgggaggtcaaggttggtgaatcgcttgagcccaggaattcaagacctcatctctactaaaaaaaaaaaaaaaggaaaaaaagaaaagctgggtatggtgacacatgcctgtggtcccagctacttgggaggctgaggcaggaggatcactttagcccaggagattgaggctgcagtgagctgtgagctgtgattgtaacactgcactccagcctgcatgacagagcaagacccccatcttaaaaataagcaaataaataaataaacttgttaaatctataagattttttataagccttgtggtaaccacagcacaaaatcatataatcagttcattaaaaataaaaagcaacaaattaatacataacacttaataatcacttaaccacaaaatatgaagagaggattctcaaaacaatctgaaaacaggcaacaaaacggcagtagtaaatccgtacttagcaataataacactggatgtatatggtctcaattctcaattaaaagtcacagtgtggctgaatggataaagaaataagacccaactatatgctgcctttgagaaacccacttcacctgtaaagacacacagggactgaaagtgaaggggtggaaaaagatattccatgcaactggaaaacaaacaagcaaaaaagcagatgtagctatgcttatattagataaaatggaccacaaatctagaattgtaaaaacagacaaagagggttactatataatgataaagggatcagtttagcaagaggatataacaattataaatatctatgcacccaacactggagctcctaagtaaataaagtaaacattaatagatctaaaggaacagatagacttaattacagtgataggaggggacttcaacaccccactctcagtaacgtatagatcttccaacagaataacaacaaagaaacaacagagttaaactacacatgagacccgataggcctaatagacatttaaagaacatttcacccaactgctatggaatacacattgttttcactgcacatggaacattctccagaatatatcatatcttaggacacaaaacaggtctcaacaaattcaaaaagtacatatcatatcaagtatcttttctgaccacaatggaataagactagaaagtggtaacaagagaaatctcaaaaaataaacaaacacatggaaattgaacaacatgttcctgaacaaccaatgagtcaatgaagaaattaagaaaggaattttaaaaattcttgagacaaatgaaaatgaaaatacaacataccaaaatctgtgggatatagcaaaagccatagtatgagggaattttatagcaataaatgcccttaatataaaaaagtagaaagttcaaatacacaacctaatgatgtacctcaaggaactagaaaagcaaaagcaaaccaaacactaaattagtagaaggaaagaaatgtaaaggtcagagcagaaataaatgaaattgagactaaaaataaatacagaagatcaacacaacaaaaagttggttatttaaaaagataaaatcaacaaacctttaactagactgagaaaaaaagagagaagacccaaagaaataaaatcagaaacaataaagtaggcataataagagacctcataaatacaaagaatcatgagagactactatgaacagctataaaccaacaaattggaaaactagaagaaatggatagattcctgaacacacctaatgagactgaacaattaagaacaagaaaaccttaatgaaccaataatgagcagtgagatgaaagtcataataaagtctcctaccaaagaaagcccaggtcctgatggcttgacccctgaatttcaccagacatttaaagaaggactaatgccaatcctgctcaaacttttcaaaaaagctgaataggaaggaatacttccaaattcattctgtaagataatatgccaagaaaaataataggctgtggataaggaaaaacagatactttaacattcttgcaaatgaactggatctttttgtgtagtgtaatgtcaaaataattctttatattatgacatacagctggaaagtgactgtgtagcatacaactggaaagtgactgtgtaacacaaaacacatcttctacattcaaaaattgaccatttattgcggtatacatttagtttctgatacttatagggaaactcgaagacagtatcctaaaatctgccacagacaatggaggatggattgacacaaagttgtgtgatagacctttagagacagtatgaccgaaagagtggcaacccaaaactaaatgcataatttcaatatgtaattttcacagcagagattttataattttcatatttcaaaaattaagtttatctaatggcaataaaagtgttttccacatagttaatgcaatttagtgacatcattttttaagatgtctgctaatttttgtgtctgaatttgttcataacagtctcaagccatctctgttattacatgtgttcatattagcagctgtaagtaaagactaattcgtggttgttttattagtagcttaaataccatgggtagtattgttggcagtgatgtacttttagaaaaattttagaaaatctaaaaaacaaaaaatacgatctttcctcaatttacccagtaattgcatttctccagaactcaatgcataggtcactgagtcttaaatttctttgtctcctatttgccaagacaaaagctaagtttttgtgctgaaatactttaaaattgtataggtaatttggaaatatgtgatgtgttgattagacactatggaagtaaaaattataatattgaataatttataattttaaatactatcttaattggatttaaatatgccttttcatgacaactttcttctaaattattttacttaatttctttttaaaaactttcaatattatgtagcaaagtacttgcaatttacacttatggtggattttctctggtatgacatttgaaagtcatgtgggatgtgggacatgggacaatttgtcttttggtgtcctcttaataattccaggacggctagcatttctaagtcctgaccacaaaagaacagctaattccctctgctgtgactaataaaaacattcctccaaactttcaaacaccctcaagggggcactagtgccccaattgaggatcaagggttgtctcttacctttcctgcactgaaggcaatctgctcttcctcccttgtggtctatacttaaattctacgaatgtggagagcaccaacttccaactttgcataatctttctattaagaaaaaagttgcctgtctaccaattccagccattatctctgactctgacctctgtgggtgtaaagggccgttcaaaaactcatttccaggtaactgtaattacttgaagattgagctcatattcccaatgtcttcctttttccaagctttactaatacaggaagctattaagtgtttctcaggtcctagcagctttctccaactcatttggtttttcagtctcccttaaaatttaagttcagaggtggtcttatcaaagtagcatttagtgggcctattggatacttcactgaaatttctatgtgacatcatggtcgaaggtgcctcaggaatatgagtcaaagtcatgaactagtacaactgtatctacataggactgtgagttaaaaccatgatagtttcccaaacttatcaaaatgtttggagtctccatgtctccctgataatagaatggactatgtaaaccagcttggaaaatttatttaaactttacaagaaggaaagttgagttttcatggaaattatttctagttaatgtaacccttaggatcaataacctttttcttattggtatcttaaatatcaaatggaatattgtttctatcttattcctctctgtagacaagacaatctttttatgatgtgcctttcttattttcttgaaaacatataatgttggtttttatcctttagtcaaaagatctgttctactaatcatgttattgtgtatataagccctttccattttatataacacaatgcctgaacacctataactgcttaacagatactgttgaatgaattgaaattgcggacctcaaagttgaacatagtattgcagttaatatttaatcggaacaagtttaacctttcagagaagtgaaataatatcttgctttagtagtacctgaattgcaggttttgtgtgtgtttgtgtgtgttttttacagaactttcattctagttgttttatgtttcttcccagcattcattttgatatatatagaagtcatagtcattctcctttaaagaaaaatacaactttggcacagatttttcagagcatgtttgaatcagaatgccattgttaaagctggggccgtaactggttgggctaacctgcagttcaatttatctataatagaggcctctttagaatgcctctgaatgactcctgtgtcatggagggtaggttctacctctatagaaagaaaccaaactaccaatgagtccagtatcatataaattaatctaatgtgtcatgtgcaagggtagagagccctcaaacagttgccaataattctcaacattgtatcatcaataaacatccataaaaagaaatgcaccaataatggtgcttttcccaggatgttgaaccaaccatcccattaggaattttaggttgccagcagtttcacgaaactttggtggtatgtggtgacaggtccctttgacagtcagtcattactatcttctagtcttggtgaatcaacctggatccctgggccaactttaagaggacatgttaagtctacataagataatcagtttcccaaccttaaaaaaaagaaaaagaaaggaaagaaaaaacaggaatgagacgtgttggacacatcacaaatagctctctggtaatagaatatccattcatcaatccatttaactaatatatattaagaaccttctaagtactactcagatgccagagtacttgtggtagtcgtgatggtaatgaacccagagcgctactttcactttctgttcacaaggagcttatgatctagtgaaggggaagatggtaatagtgctgtacagtgctctacaacagggaaatgtggtgcagaatgactgtgtggtcaaagctttctttgaggaagccatggaggctatggtctgaataacaagaagaaccagccacaaaaaggccaagaaggaggatgccagacagagggaacaggcaggcctgagtatagatcttttaaggcatgcagttggaatattatcttcagagtaatgaagggccatttagagaacttaaaataaacagtccgatttacatttaaaacaatccctctggttgcttaatgagaaagggattattgtatcaacaatgaaagtaggggaactaattaaggggctatttgtgccagctttaaaaattatattctaattcaaagaagttgcaagagagtgatggtaactttgactacggtggttgtaatggagatgaagagaagtggacagaattcaggagctcttttggaggttgtgtccacagaactttctgatacggcagaaacacgaagtgagggaaagggaaattaatgactcccaggcttcacccttgagcaactaggacaaatggtggcgcaattcactgagattgagatgactagtaaaactacaggaggaggacatttagggtgaagtaagaatcaaggattcttctttggatgtaaacaaatttaaaatgattattggatatcccggtgcagatgtgaaggccaggggagaattctgggctggaaatataaatttggaagtgtctggatgaaatcaccaagtagtaagtaaagacagggaagaaaagagaagccctggatcaactctagaggagccaccccagcagttagaaattcagcttagcaggaagcatcagaaagagagagtggaaaggaacagctaaggaggtcagagaaaacaaaacaaaacaaaacaaaaacagaattgcacaccaccatcatcaaacttatgctttatcctgaccacagacatgttcgggcacgttcgagataaggaatcatataactttagtgctaggagagcttttggagataattcagtgctatgtcctcatttgaacaagctggcgcttagagaaatgtgacacgctttatacattgctaggtcttggtccagaaacagtcatttcgtactttttatccatctgctgcttctattcctggactggggtgtggcctttttccttcaaacttcattttttctattaaaaaatttaacagaacagggaggagcctcatacccacttttgtgactttccgttcctctttggaatttggtcttagggacattggcttgattttcttaatcttactcatacaaacctttatagagattagaaatctttaaaacataatttggctatggacaagaaaaaaatcaaaatactttgaaatgttaagtatttgggggatagtaggctttttctctctgtctctctcaaatatggttatagatacatagaaatctgtaggctgccagtcagctagaaagaagctaataaaatgcttaaggtcttatacttttttaaaaaattattcatcctgtgaatcagagaatatttacttagcatttactatatgccacacactattcttggttctgagcatacagaaatgaacaaaactgacaaaaatgtcaaccctcattctaatggagaaaaggagatgataaacataaatataagaatgttaaatggtgataagtgtcatggagaaaagtgaaagaggaaaagaggataggaagtgctgtgggggatgggtgcaatttttgtgaggagtagagtaagtgtcactgtgaaggtgatgtttgagtcagagcctaaaggagatgagggagtaaaccaaagagatcactgggatgagattctgtaggcagaaggaaccacaggtgcccagctatggaagcatagtgttcctggcaagttcaaggaaaagtcaggcaggcagtgtggctgcaatggaacaaacaaggtagagagccatagatacagggcagagaggtagcaagggaacagaccgtgtagggtcattgaaaagacactttcctgtgagtgagatgattctccattgcatgctttaagcagaggcgcataacctaacgggtttcactgggtcactctggtgataatagattgttcagggcaaggataagagcaggaaggagccaattaggtaatatgaccatacatccctgttgccttagacaataccactttgcaactcttatggattatttaaaaggcagtaatcctctttaggatttggggcaaggcttttctgccccaaaagtgttcccgtgtggacatttttgataaattacatggtcaccttaaagtttagagaacactgagtctgtccagataagagattatacttgtttaggtcagactgggagccacagaggcgatgaaaagtggtcagattcaaaatttattttgaaggtgttgctgagaaaatctgctgatggacttagatgttgtctatgaatgagtaaaagcagcctagagacacagcaagatttgcggcctgagcaattggaaagacagaggtttgatttattaacttggaaaagattatgggacaggctggtttggggcaatgtcagaagttcaggtctgggtgggtcaacattttgaaggttcctatgaaaccattaaataaatactgagcaggcagttagataaaggagcttggattcagtgaagacttcaggactaaaaatataaatttgagtgtaggcaggcgacagatgtgatgagttaacaaagactcaataaagaaaaaataatgctatccaggaactaagccctgggccactccaactttaagacatggagatggtgagtaaaaaccagcaaaagagactgaggagcattggccagggaagcaagaaagagcacagaaaagtgtcctgtcccaggagccaagggaagagaaagcctcagcgagtggagattgtccaggtcaaacctgtgaacaaatctggtaagatgaggaatgagaattgaccactgatcttagcagcccagaagtcactggtgattttgagaagaggcatttgggtgccatggtgacgggaaaaaaaaatctaaaatgcacaggagctaaagaatagaagaatccaagaatttttggtagttttttgtttttattttgttttctttaagtgagtgaaaacagcttgtctgtagactaagcaaaatgatccaacaaaacagagaaaactgttgatgcagcatagttagaggtgagacttggtgtgatgtccttgactggagcagaggagatggaacccggggatccagtggaaggattgggtctggatatatcttcaggaagacaatgacagacaaacagacagtatgggcattaatgggatagtgagcagagtgaagatcatgatagccgcttgtggatggtttcttctgattgacttcttgtaagataaacacatgcatgttctttaggtttgcagggggcaatacctgccatgctactcttctgatatatacctccatggccagcagccccatgcaagcattgttttctgatttaggttctcagtgacagccatgccacagtcccatggctctgtacctgggcctgacactaaccaatccctcgcctcaatatacccctcctcactgcagtcttctgagtgtcaccatggtttgtcaactgcccagaggcataccaaaccactttagtgcttctttttttttttgagacagagtcttactctgtcatccaggctggagtgcagtctctgctcactgcaacctctgcctcccaggttcaagcgattctcctgcctcagcctcccaagtagctgggattacaggtgcgcaccaccacgcctggctaatttttgtatttttagtagagatggggtttcaccattttggtcaggctggtcccgaactcctgacctcttgatctgcccgcaagtgcctcccatagtgctgggattacaggcgtgagccaccgcgcccggcccactttagcacttctctaaaggcatttctcctgcccatcataaggtactgcatattctgcaggtacatgattctctccaatgtattggaagaatctgaaggagggacacatagggcaatgactgtgaagtctggcattgacctaaatacacaagcaagtgcccactctggaaaagttggtcttctaagcaaaggaatttttctggaggcctggtcatccccacttatatgcaactgactgggtaactcgctgattgggaggaaaacaggtgtaataaggacccttgattaggagtccagaggtgtggatcccagttcttgccctcacaaacaaattgtgttaccatagcaaagtaactcagaccctctgaattccagcttcctatctataaaatgagtctgggctagatgatcttttatgctccttcaacttttagaatttcattccatacctgagttcagaataaaagcagcaagattaatgatgcaatgaaagtgctgatcttattctaagaattttgcaatatatgactcctaacaaaataaaaatgctaagtaaaagcacatgctcctggaaccactgaaaaggaggtattcagatatttgttttgaaactaagtgaagagaatcagaagggtgagggggtgggaagtgggtggatgatgagaaattatttagtaggtacaatgtatgttatgtgggtaatgaataccctgaaagacctgatttcaccactatgcaatctatgcatgtaacgaaattacactagtatcccataaacatatgcaaatttttaaaaatttaaaaaaaagaaagtaatgttaaatgggagctttctctgaaaaactctattgatctttagaagttacttaaggtactaaaactatcaacccatctagtgattcacagaagaagatattatacttgctatctctaagccttaaagaatataggtaaggctgggcacagtggctcactgcctgtaatcccagcactttgggaggccgaggcgggcagatcacttgaggccgggagttcgagaccagcctgcgcaacatggtgaaaccctgtttctactaaaactacaaaaattagctgggtgtagtcgtaggtacctgtaattccagctgctcaggaggctgaggcaggagaattttttgaacccgggaggcggaggtcgctgtgagctgagattgcgccgctgcactccagtctgggtgacagactgagactctgtctcaaaaaaaaaaaaaaaaaaaaaaaaaaaaaaaaaagaatatagttaaaaagtaatgcaaatgacagacatttctaactcctgagaaaattttatttttatatataggaaaaaggcctcataatttaatgtgttttcaggtgctaaatatttgcctgaatttttttttttatttcctggttttttttttaaatgttcaaattacttgttaaatgtatctaggaaaagaatttccctaagtcaacaagacaaggtctaataaacttcaggtctaacaaagacttctgctgtttaatgtaaatatttctctccttaatttcattgcatatcaatcttaactcaccctgaataatttctatacctcttgtttattttcctttcagacagtgctttcttttgcagatgttatttcaccaacttgagcatagtttctgcagtccacactgcttacattgcagatgcttcctttggccaagtcgaatatactatatgacttacgctgcttaacatagagttgcttgagttgaggaaaataaaaataaatttaaaagacttatgacaatatagatgttaacatttatgctttgcatatgaagagcattctaaaaaactgttatcagtgaggctaaagattgaaaataaatgttgttatgtggatcatggattaagataattttaacaatacttttctacttaattttccttattaccaatgttgcacatttgtaaaatgactcaccacgctggtccttatggatataatcttggcctcataaacatcattctctaggcagctaaattaatgagtcacattaaaagaagaaacaatgtaatagctatcagagaaagatgggttttagacaataaacacattacattctgctcctaggctaaatattacatctgactattccctttggaattcctgagaaaaggaagagatttgctgccagagcacagaataagaatcagacactagctcacacttcaggaaggtcactttcactccccagagatcctaggcaacagcttgagcctctcataatccaatctaaattaaatggtagagatggccttgcagccttccagtctgcccatattctatgcattgtacttgattttcttataaaattagattggattctcagtccaaacccggagaggcatggaatgagagagaagaaaagaaaatagggaaggccagctagttgagtggaacgccagcaatattagaaagcttttagagggtatttaaaagcaaacaaccctatatctatacctcattttatgaaaatggtatgtctatcccccttacccatatacataggtactcacaccaaatatcatggactgtgaagttattttaaacaaaaggaaatttgaccttttggagcatgagaatatggaaaatgttatgattgaaaatgtcatttagagagataaaaagcaatagccaggagatgttccataactaatatctacatgactttacattatataaagtgtttgtgtatgcattgtcttaaatttcatttactcttctcaacattattggttttttcctatccttctgctttagaagactgactgtatttgatattttatagggttttttcatccctcatgtgcagaaagggacatatttggtattttgaatagtaagagactgtattagtttgctagggctgtcatagcaaaataccacagactgggtggcttaaacaacagaaatttgttttctcacagatctggagtctggaagttcaaggtccaagtgtgagcagagtaggcttctcctgaggcttgcagatgatcactttgtaactgtgtcctcacacggtcttttctttgtgcttgtacatctctttactgtttatatttcctcttcctataaggacaccagtctgattagattagagcacgtgctaacagcttcatttaatttaatcacctctttaaaggccctattcatcctgggtgtggtggcttacgcctgtaatcccaaaactttgggtggctgaggtgggtggatcacttgaggtgaggagttcgataccagcctggccaacatggtgaaaccccgtctctactaaaaatacaaaaattagccgggtgtggtggcaggcacctgtagtcccagatactcaggaggctgagtgggaggatcgcttgaatctgggaggtggagtttgcagtgagccaagatcatgccactgcactccagcctgggtgacagagcaagactccacctcaaaaaaaaaaatagtcacattctgaggtactaagggttagggtttcagcatatgaatttaggcggaggggatataattcatcccataacaaagatagaaagcaatcaaaatgcctttgatgtcattgtattccctatcatatgcaattgcctaattaatatttagccactatctactttaatcttgtgcttctgagaatggaaaacatgagtcatgtaaaccaggggtgtccagtcttttggcttttggcttccatgtgccacactggaagaagaattatcttgggccacacataaaatatgctaacactgatgaatcaaaaaaatttcactaaaagtatctcacaatgttttaagaaagtttatgaatttgtgttgggctgcattcaaagccattctgggcagcatgcggcctacgggccatgggttggacaagtttgatctaaaccatcttaggctgtggcactgagctggccttgacttctcatgagaagtgggaaccccctagccagtttttgccagaaatttccagacttctactctaggcaataagaagaaatgctctaactcagtactattcatttgaaacataataagggccacatgtataactttcaattttctagtagccacattaaaaattagtaaaaagaaacaggtaaaattgaattcgatatactttatgtaaccaaatatatccaaggtcatattgttccaacatataatcaatataaataattattaataagatattttattcttttctcacactaggtctttgacattctgtctgtattttacatttgcaacacctctcaatttggactagccacatttcaagtacgcaacagctacatgtggctagtggctgtgttggacaattcacattccgattcttacattttaaaacatttcctgggacagttgttgtcttgagtaggaaaatctaattataagcactcccaattcaattatactttcacttgtgaaatcttgtaatagtaataagttcataattataataacaataaattgtaataactttctttgtttcctttgggataccagagttaaatttctgcctgattaatttagggaagcacaccaatcacgaagatcctgaacagtcctcaagcaggtgatttatgtatgtattcattgacctatagagctgacatgtaaacgtcttccagaaaagtacacagtgatcacaggtgcagggaccttgaaataatctattgccctcatattccacccaaaaagaaaaatttgttacgtggttgttagatgtcccagacctttaggagattttcctgaggatcttatcacctagagccacattctcagccagaacaaaggaaaccctcactgcagtattcatgtcgtattccttggaccactgggagctcttgcagtaattcatgatagttcttgactttgcccctgaaattggataattttacctacataaaaacagaagagaacattaagatacaacctcagcgtgtctggtcttgcctggtgcttgaatcctcctcttttggttgatgaatcttgactcatgttttaaatcagccgataaataagattttttgagtacctataggtggctacttcaaatgaagacaaagtcatttataacacatgacccttgttcttaaagaatctaataggatctactagaatcaggccttcactcacatagattatataggaaataattaaaggcagtagaatgtcagagaagggataaatcattaagagaaagagtcaccaaatgagacttcaaggaggaggtaagactttttcttgaccttcgaatgagcagaataaagagcatactgattgaaggcaaacatgggctgacatagagcactgccctgaagttcagtgagaagactgtctttcccaggaggcaacacatctgtgtgtcaggaatggtggtgaagctggttggatagcatgcagccagtttaagcaggatcttaaagacatggtatgtttggatgtgataccacagacaatgcacagataggatttaacatgagtgaaatggcattttaaggtgattttaatccgttgttgacaaaatgaagaaagaattgattagagccagggaaaaagaggcacagcaagtttgtgatgatcaatgaatgtgatcacaaaagtctagacatgcaatataatttaaaaatagattaaaggaggccgggggtggtggctcatgcctataatcccagctcccagcactttgggaggcagaggcaggcagatcacaaggtcaggagatcgagaccatcctggccaacatggtgaaaccctgtctctactaaaaatacaaaaaaattagctgggcatggtggcatgcgcctgtagtctcagctactcaggaggctgaggcaggagaattttttgaacccgggaggcagaggttgcagtgagccgagattgcaccaccactgcactccagcctggtgacagagcgagactccatctcaaaaaaaaaaaaaaaaaaaaagattaaaggaaaaggtaacgagtttttaaaagatatgctctctgggactgagaaataagggaagagcctcagaattgtgactgaggaacaattctgtagtgtgcatttttaaaaaagaaaagcctaggctcagcctaactaatcattcatctatgcccccaaacaacttcacacttggttctatagattcaagttccacatgagtcagaatccctaaaggacataatcctattagcaaaggcagttataaaggaagtgagaagtggaaattgacctctgtgtttcattagcagtcttcctcagagcagaagtgggacaatacaatgcctggaggactggacaattcattgcaagtgaaaaagggctcctgacacctattgtgaattttgcttgcctaagaagaactcatctctttcctccttcaactcttctgcctaaccttgtcaagttgctgcaggaaagaaacatgcttctttttagttggacacaagtttaggagatctgtgataaatcatggcaagaatgattttgacatacttcttggtcctgggcagagtcacaatgatgatattctagaaacaaggttcaaatctttccacacaaagatgtgtacctgtcaaagcagtgaaatggctgacaggactttttcaagcacctctaaaggacaggagctggagaacagacttaggagagtggggcagaaaatgaaaaatccaagtaacaagcaggaagaaacctacaacagtgggtagtcgtctgacaggcgcatataggtggatggaggatgctgttatgtgaacctagcagcaaggtacaatatgtccaaataagcaatgtcagggggtctgagagcaggtaacagggaccccagcttaaaaccttgagttcaggcacagcactctgcatactgggggacctagagggaaagacaacatccaaaagacagggtcacaagcagaagaccaggagacattcaggaatggagaatgagacagcagatgactattagaattgaggaacaggcagggttttttggtctcaagagagcaatgccagtgactcaattactagaaataagtatgaaaaggacagacaacacagcttcctttacgaatggatttatttattattaagataaaatgtctaagataaaaaatttatctaatgttttattaatcttccaatcccctcctatcaattcttttcttaaaaaattatattatcagccaggcacggtggctcacacctgtaatcccaatactttgggaggccaaagtgggtggattgctggagcccaggagtttgagaccaacttgagcaacatggcaaaactccatctctgcaaaaaatgcaaaaataagccaggtagtcccagttacttgggagtcgaggcaggaggatcacttgagccagggaagatgaggcttcagtgagctgtgttcgcactactgcactccagcctgggtgacagagtgagacccccgcctcaaaaaaaaaaaaaaatgatactatctgtttagctttatctttttaaattttgactaaattttcaagcagccatttttctgtctgaattgttccagatagtttccagagaaaggaagacaggttgttggctaaataccaaactgcatctcatcattagaaggaagcacaccaaatttcatttttctccacctttattaagtgcagatttttgtttctcatccaggaagttctgtattatcagggcaatgctaacttcagtataaatgacacagaaactattaatagattatgactatgatgaaactgaagtagaaaacagaagtgttctgaaaagagaagtaaaaaaatggaagggggaaaaggcaaagtattctgccttccaagttagatagctatctttatgaaaggacatatttcaaaggcaatataaagtctttatggtgctcttacctacctatatttgaattgggggatgcttcacctgcttattagtgaaagaagaaagaatacacttagtaaattaaattttttttaaaactttgtctttgctcagaaccagctccacccaaatcactcttcgcagtgaacaaaacccagacttcagtgactttgctgtgggtggaagagggagtagctgatttctttgaagttttctgtcaacaagttggctccagtcagaaaaccaaacttcaggtactgtaccttttgatctaccttttctcagttaacttaagtaaggctaattatctgggcaaaataagaatcttctatttctttgagctatataaaatgaaaactgtttatttgctcttttgtgtttcactgatagaaattaacagcaggcttagaccaagcccaaaagttgttatgagaacttttatctttgtctgtatcacttgttcctaattcataagtcactccaggtcagacaaaggaataaaggtagtaggccattgaattgatcaagggaagaaagaccctacaatataaaatataatttaacaaatatgaaccatttgccaagtatataaaggcactgaatagaacacacatgatagaatcaatatttgccttcaaaacatttttatatggtgtagacattgcataagtatagaaaaaagtaaagtaaaatataagtaccacaagacaggtccattcgaccaagagaatttaaaagaaacgtgcatatctagtttgtaagggggacagtcttattgcaaaatgaagactgagagaaggttattgctaaagctctagaattacaaatggcagatacgataaacagagttattcaccaggtcagaatgaatgaaaggaaagagatgaacctgcagttctatgagtggcaacgccacaaggaaaaaatatttcacagccagaagtgaaaggaaaaggacagatttgttagggattttacataatatagtgtgtagactaatactgcgaacataagtaattgatcttttttaaataatgaagttcatgagattgagaagaaaaaaggaatgctgggagtgcaaatcttttcatattgaatgctaagataatttgctttgattcctttctccttttgagattcccttctatgaatgtatctcttgttgatttgtactgaacagctgaattttctctattctaagaatccttttggaaaataactgctctgccaataatggattttcttctctataactacagtgatgccttcctttaagaaaacaatggttagttagctacttactacaactgagtcctgttagcaaaagtctttccttagaataattcttttatagaatagtgaaagagaaggaagtggaagaaaatgctgatggctctcatttctttatgcaagggtgtttcaaaatcttgttttgaaaaaaatgctggctcatcttttgctgttgtacagtagtacttgtcactagtctggccatgggtccaccaagttagcaacttctttgactcaagaataagttaatactaaatgtttcttagtgcggatagttgccatgttttagtggatgttatataaaagctaagaatgcagacaaaggtgtagtgtccttaatatataaagaattgctacaagtcaaaaaaggtaaaggtcaacaacccaaaacaaatatttcatagaaaaatacagaaatctcttgaacagatgaaaacttcagcaacctcacttacggtaaaaaaaaaatgcaaaataaaactacaatatacaattttcactagtaataatgggaaagctcagagtttgcaaatgtatggtactggaaagaatgtagggaggcaggcattgtcacgcattgatgccaaaggtgagtaacttgcaaaatgtctgtagagaactatttttctatagctttcaaaattttaaatgtacactttttgactcagcagttcaaagaatgtgacactagcaaagaatatatgagtatatgtgtatgtgtgtacgttcacacatatatacatattacatgcatatattgtgtgtatatatgtgtgtatatatatgtgtgtgtgtgtgtgtgtgtgtgtctatatgcatatgtgtgtgtcttcccaaatttgtgaaatgaagttcattgtagcattgtttgcaatagcaaaaaatcagagaccatttacacattcatcaaccggggctcattaaataaattatggtatgtcctttcaacggatttctgtccagctcttaaaaagaataaaacagcttaatctgtactgatatggaaaaagcaccaaaatatattgatagctaaggtaaaaaaattagcagaataatgtgtaggctaagccatcacttatgttttttaactgtgtcatatatgttcatacatccataaaatgcatatgggaagaaaaataatgcctgacaacatggaataatgctgcttccatggaagggaattggtcagatggggaatggggaaaaaaggaaacatttttcaatgctattctttgtcatcttatacattttttactctgtcaatctattaccaactcaactatgaaatatatttttaaaaaatatagatgaagttaacctaaaatttaccttattttctgaaaccccaggaaccagttgctgtttcttcccatgtcgtgaccatctccagccttcttcctgccactgcctacaattgtagtgtcaccagctttagccatgacagccccagtgtccctacgttcatagccgtctcaacaatgggtaattatacacattagtgtataattttctcactttttttgaatatatatatatatatgtatttgtatcaatattccaccaagaaatcccaagcttcggagtcagagagtccttaatttcaatcccaaagtgcacttactagctatggagttagagaaagacatttggtgcctctgagcttttctttcatctgtaaaattggaataataatatgtaactttctgagttgttttgaagcttagaaataaaatacttaaatccttagtatatgctgtctaaatgctagttgctaactcatctcatcttcttcagtaataggcacagtactcttatcaatccaatttcatctatttagccttggtcttcatctgtcaccgatcagagaatgacataattgataactgggtcaaagcaagaaagtttccaatccagccaaaagtataagtgggaaaattagaggttaatgaaaggtctggaatgatgctgtttatttccttattcttttcttagttgtattacatgtgttactcctggtttgttagagtctgattctgcaacctgagaccctctatgaagcctcttgtaataaagtcactcataacttcactggtttagttccatttctgtaatattagtcatatatttagctgctaaattcagggatgactggagcggactgttttcttttttctttttctttttggttttctgtttttaatttttgttttttcagaagagaggacaaaaaatatacctgcaaagtattttaatggtctctcattcctacatccttgtacactttctaaaatatacagttgacgatgaataatgagagacttagaagtgccaacctctgcatagttgaaaatccatgtataatttttgactccctcaaaacttaactactcataggctactgttgacctgaagtcttaccaatgatatagacagttgatcaacacatttttgtatgttatacttattatatattgtattcttacaataaagtaagctagagaaaagaaaatgttattgagaaaatcgtaaggaagagaaaatatatgtactattcattaagtggaagcagatcttcataaagatcttcctcatggtcttcacattgagtaggctgaggaggaggaggaagaggagggtttggtcttgctgtctcaagggtggcagagagtaaagataatccatatatatgtgaacctgcacagttcaaactcattttgttcaagggtcaactgtaccttaatgtccatcattccttgtcagctccatgacaatgtagcataacaggtgatattattaaacttatttataaatgaggaaaatgaggcccatagggcagatgaaatggcttctctccaaatagcagtactcaagcgaaaaagctcttctgatcatgcgtccattgttctttctgtttaagcactctactcataaactggagccaagctggcccaaatgggaagtggtaaatacccagaaccttagggatcagatgcacctgctcattctgtgactttatgatcaatgcaaaagatggtatgagtcctcaggcccattttaaagagttttataagaatattaaacctatgttcctgcctttgatatcctgttcttccgtgtagtatgaagaagtagacaatgtgtaagtgccacaggagacaagtctttatatagagtacatgaaaaggacgtgacccctgttcttcagggccctacaacctattaataggttttatctcttgagctgtgcagatggaaaacccctaaacatatggccacggatcatcagaatgtctgcttctagtaatgtgttaagtgcttcagcagatggtagtttgctaatgtctttttgatatacattattagttgtaagcaaagtatacagttgtgctttctgacttcaaaatcatgggcgtaaaataagaggttgccaccctctaagcttgtgaaaatgttaaaaaacgataatgcatggtaatgacttccacatttttagctttcaaatgaatttaaactgtggcacaggtattcttcattctttagtttccctatgtaagaatatcctgaatgttgtaggcctttgaaagggactcaattcttccagacacctcaataccacttatcagtctagtttgctaagttacagttgaccaggaagaggtcattgctggcttggggaacatgattgttactattattggtatcatcgtaagctcactgcccttaagactagatgaaaagcaatgaatggttctgtttggttccctgtaagagaacctatgatgaaaatgcacaacttatctctttagttacagagatgaatcccaatgtggtagtgatctccgtgctggccatccttagcacacttttaattggactgttgcttgttaccctcattattcttaggaaaaagcatctgcagatggctaggtaagttaagttttactaatattttatccggaatctttaaaatatctttatctgccatatatatattgtttttgcacacctaagttgtatagcggtatattggattttagttttcagtgtctgtttctattgtgtgtgttttctaaatagacttcgaaacattatattggaaaatattaccattgaaatgagaaagcaaaggattgcttgtttacacaaagtcagacctcttgctatcaatcttggcatttgaagtagcccatatatggagatccattacatttgggtactttcatacacatttggaataaaagaaatatctatgacagttcagtatagttaatgaaaaaagttaataaaaatggagatgacaagaaagaacggggtggggggcgggaaatcctctccataattttaagctgttctattggaaaatatttgtacagtttatgattaggtccattagcagtctctattagttttattcctattactcagagttgcagccagcttagtttttcttgcaattagaaaagcctttgatttatgatttcagctcttccctgttcctttgaccactgatgcattgctcatcagagcacattctcaagtagtttctgtggccccctgtattatcagaataatctatcaattcccttaaaaactgttgcttatttgaatactacttggtttgggaaattttgttaacatttatatttgcccaatattaacctgctgaattataaattaacattcttctcctgtctcagagttctatcactcacatatttataaataaattcatctatccaatagtgatctaatcagtgcctgacatggcatatccaaagaaaaatcagacatcaaagctgtccactaggagcttacttacctaactggatatatgaatagatagatatatttaaaggcataagctgacatgtagcataaaggggattaaaaacaggatgccatgaaactagagaataaagactaattctgaatgtgaaaataagcttcttgaaggttggcatttgaataatcttaaaaggataagaagagatgtgggattgcactgtaactacagtggagagctctgaaattacactccttgaggtcaaatcttttttttttttttttttttttgagacagagtctcactctgtcgcccaggctggagtgcaatggtgccatcttggttcactgcaagctctgcttctcaggttcaagcgattcttctgcctcagtctcctgaatagctgggattacaggcacgcaccactaggcctagttaatttttgtatttttagtagacacagggtttcaccatgttggccaggcttgtctcgaactcctgaccttaagtaatctgcccacctcagcctcccaaagtgctgggactataggcgtgagtcaccatgctcggcctccttgagatcgaatcttgacttccaacttgcgtgaatttgtgtaggtcactgaaacttcatgcgttcatattacaaatattgctacatatatgacagtatatgaaacagacaaaaatatgtgccttcatggagctcatattctagtgggagaaatagacaataaacaataaagatataagtaaaaggactgccccttaagttagcaggtgataaggaaaggaaacaaggtcaggtaagggagataagcagtaccagtgtggtgttaggggtcctaggaggtgggtaggcttcactgaaataatggcattggagcagagacttgaagcacatgagggaggtagcctgtgttatctgtgggaagagtgtgcccagtggcaagaacagctggtgtaaaggccctggggtaggagcacgactgggatgttcaaagtgtagcagaggggccgttgtgactaaagcggaggaagacaagagtagaaggagatgtcaagttatgcagggcttcgtatgcctttggaaggactttggcttttactcagtaaaatgagcaggcattgcaggctctggagcagaagattaacagcatctgacttagatttaacactttcattttgacttttatgtagaaaacaggctgtattgaggcaaggacagagacaggcatatcaactgtggtagccaggaatccaggcaagagatgctaatagttcagtccagagcagcaacactgaaggcagagagaagccatcagattctggacatattttgaaaataggagcaacaggatttgctaataagttgatatggaatggaaatgaaaaaaggagttgaggctataatcccagcactttgggaggctgagccaggtggatcacctgaagtcgggagttcgagaccagcctgacaaacatgaagaaaccctgtctctactgaaaatacaaaattagctgggcgtggtggcacatgcctgtaatcccagctactcaggaggctgagacaggaggcagaggttgcgatgagccgagattgcgccattgcactccagcctgggcaacaagagtgaaactccatctcaaaaaacaaataaacaaaaaaagagagttgaggctaactcctgggtttttggcccaagcacttgaaaggatggagctgccatcaactgagagaggattccaggtcagagttgggggaacatcaagacttcagttttggaaattgtattagtcagagttctctagagggtcaaaactaatagtacatagtagtatatatatatcctattagatattatatatagatatagtgtgtgtgtgtatatatatatatatctcctattatatattatacatagatataggtatatgggagtttattaagtattaacttccacgatcacaaggccccacagtaggctgtctgcaagcttgaggagaaaggagagccagtctgaatctcaaaactgaagaacttggagtccaatgttgaagggcaggaagcgtccagcacaggagaaagatgtaggctgggaggcgaggccagtctctccttttcacatttttctgcctgctttatattcactggcagctggttagattgtgcccacccaattaagggtgggtctgcctttcccagcccactgactcatatgttaatctcctttggcaacaccttcacagacacacccaggatcaatactttgtgtccttcaatccaatcaagttgaccctcagtattaaccatcacagaaatgttaagtttgagataacttgcaagtgcaggtgcagagtagccacctggacataaaagtctaatgtttgaaagagaatttttggttgaagatataaatttgagagttgttggttctgcacagtggctcatgcttgtaatcccggcactttgggaggcaggcagctcacttgaggtcaggagtttgagaccagcctggccaacatggtgaaaccccgtctctactaaaaatacaaaaaaattagccaggcgtggtggcgggtgcctgtaatcccagctactcaggagactgaggcagaagaatcgcttggacttggggggcggaggttgcagtgagctgagatcgtgccactgcactccagcctgggcgacgactgagtgaaactccgtctcaggaaaaaaaaaattgagagttgttaacatataaattgcgttagagctttagactggatgaaattcagggagtaaatgtaaaagaaggccctgcattaatcactggaacaatcaatattaaggttttcagggagaaaagaagataacagtaagcgactgacaaagaggcagccagtgaagtataaggacaactaagggagtgtggtggcctggaagctaggggaacaatgtgtatgcagaagagatgataattgcccctatattagtggatacttaggagcattaacgcagtaataacatagcgtaatactcaactcataggaagtgtgcagtaaatgttagctcataatagtaatggtggaggaggtggtaatagatgtaatgcaagtagtggtatttctgagcattttttgtggtacataccaaagatatttaggagaggtggttctgattctttcagctagttattaaagcatagattctcatcatttttcatgctatgatcctttttggcagtctggtgaactcttctaagaataatgcttccattttctgtgcctaaaataaaatacataggattatacaactatattgaaatatgataatcataatatttaaaaagcaaatgtgttgtacactttttaattagtatattcaatgtcaatatgtaatagtctaacaatttcatcatggtgatgcatatgaccaatatttcaagatatctgcagcaagtctattattaaaaaatatgtaatctctattgttagcaaatcatccatgtggatattctgatggtttggtacctactttaatgatagaaaggactgctaagtttagtcacaggttgtgaaaataaatatgtacccttttcccacatatgttcatagagtcctaaattctatctttggaactccagattaaaacccttgagttacaggtaaaataaatcccatatataggaaattgacataggaaaattcattaatgatgtgtaaattataatacactatgatattatattagtgtatttttcaaaagaagaaaattgttcttggaacaccttaataagaacaggtagataattcaagtaattagcacattgtgccagtaatgttaaaatctctgcttcagttctgagtattaaatccattaattccgtataaagaaaaaatgagatacatgagccccaatgagctgttattcatgcatgaaattagccaaaagatagagaaggcatgagaatatgtttactttttctctacttctggaaaaaaaaaaaaaacttcaacagtgtttttactagcagattaataggccacattccggacagtaggcacaccagaagcttgcctatttcaatacattccactcttttattctaatctccagtgatgaataatacgggcatcacaatataagagaaagattttggaggaagtaaacaatccacttgatccactatcattgtagggaggaaatcaaaatgccataaacaaaaccctacaaagaatttttgctaaagatggaaaatgctcagttcatctaggagagtttctatgttactattaaaggctttgtaaaaaaataaataaatattataccccaaatagttcaaatatttcttttagaatcatgaatgccctttggaaaggattgtgaagtgaattcttttggcctcaaataatttgatttgcaaacttgcaaaagattatttcttttcgttttagctttctgttttgcattgtatgccaaaagggaacatatggaacttctattagcttcttttattttgttttttttttttttctttttctttttgagacagagtcttgctctgtcacccaggctggagtgcggtggcgcgatctctgctcaccacaacctctgtctcccaggttcaagcaattatcttgcctcagcctcccgagtagctgggattacaggcaagtgccaccacgcctagctaatttttgtagttttagtagagacagggtttcgccatgttggcgaaactcctgacctcaggtgatccgcccacctcggcctcccaaagtactgggattacaggcgtgagccaccgcacctggcctagcttcttcttttttttaatttaatgctgtgatgataagctggtaaagactctctttacttttaggtcaacgtaagaatgctttgtcaagcagtaaccttgattttgtggttcctttaaaacagggagtgtggagctggtacatttgtcaattttgcatccttagagagggatggaaagcttccatacaactggtgagtattgttttggaacaagcttctacatagtttaactatgctgtgtgtgctccaaagtcgattttactatcctttggggatagttttgtctgattatccttttgtaatttcggtgatggtagactttcaatggctagatcttcacagaatataatggtttatataagctcagtgcagttctgaagtagggaaagcatcatggtctgctctgtatttacaatactaaacaagggactgaaacagtggtgcacacgcaggagcccatacctgtgctgaaaaagggcttaaatgcaggagcgccgctgaacaagtggtggctaaaggcacgagaagagattccaatgaagcagcttgcgacagatcggcttctccattttattttatattttattttattttattttttattgttttgtattttttgaggagacagaatctccctctttcgtcacccgggctggagtgcaggatgatctcaactcactgcaatctctgcctcctgggctcaagtaatctttccacctcagcctcccgagtagctgggactacaggcgcgcaccaccaaatctggctaatttttagatatttgtagagatgaggtctcactatattgcccaggctggtctcgaactcctgggctgaagtgatcctcccacctcggcctcccaaagtgctgggattacaggcctgagcccccatgccaacccagcatctccattttaaactcacatttcagtgcctgaggcaataagagccaccacttctgttaaaaagttgtacagcccagtattcagttctcatgcttacagataaataaatatcaaagccagtgaagtttcataagaaaacatggcttcatttttctttatgcttgagtattaaggacccggaaggaggaagtgttcgaattttaaagagcattgtcaagagattaaattggttgacattatacctgacaatgatagatgaagattaacaatcctatccagttcaatcaatgcccaacaaaagtactaattaagtaaacatttaacatgaagctaacatgtactacttacatggtctagtttgtttcttttgcaagaaactatgcaaagtatatgtaaatgaatatatgtcatattaatcattgttcagttatttctttctgtttactaactccctaaaatggttaatcttaaagaaatacacatgggagactggaaattttacagaatcaatgagggagggagaactttatttaggatataaattttacttccctcagtgtagctgatactcactctagttgaaaatctagttgaaaccagatttcttttaataaggcaatatgttgtgccatttaaaaattttaacatgagtagaattttgctattaaaaaacaacccaactgtgaagaaaaagaaatccatcaacccttgatggtgaaaagttaggaaacgttactaggtttgttcaaatatattagcactctttccaaaattaagaggttgactcactgatacttgtttcatgcctggttcacccttgggaggcccaatgggagatcagtgatgagtggcccatctaggaaccaatccaattatatgtatttaatacttgtgactcatgagagatagatattaactaacttcacagccagtcacaattcatggaatttatgggagaccagtcatgggagagctgaagcaaaaaagaattcacttcaggatctttctataaaatcaagcacattttgcagctcttcacaaagacagttttgccgactctagcattttctagctgactgagaatagatatctcagtgaagatttgtaataactgaagtgacaaggtgacagtatttttccccctaattctcagaataactatagatgcagtcacaggatattttaaaatctatattaatgggtgttctatttgacaagtggtttgaatatctgaaaccaggcatttaaatcaacagtctgaattagaattgaagtgaagctaaactattttgctcctacttagctgaatatcagtgaggtcacagactaagtagttgatgagctacttatcttgaatgaatgatatccttgtatcatccatacctctgttttaagggttatatttataaattttatagtaatttaaaaacaatacagaaagtcacacctagtagtgcagctttattaagaatgtctcttaaaagcttagtcttcaccggaatcagtatatgtaaactgaccatttttattttctcacacaagctgctgtttagctgtcaaatgatgttacagaggtttcttaaaataggcttaagcataggaagaataatatccaagaataagcttcaagataactaatgaggcatataagtgcttcatttaactgaatgcaaaatgtaatcacctggtagcagactaattaacacaaagtaagttgaaagaaatatatctgattacaataaggtcatgtgtgaataaaaactgattttgtcaatattgtagcatttaagcccgcacatttatatttcacagaatggattaatatttaattgtaattaaggtgcttgtcatattaattaatcccaataggtaatttactgatatctattcacagtttatattactaactcttgcaactttttcatctttccatctgttgtctattaatgcacacaggcgtaggagtatatttgctttcttaaccctgctaccctcatgtctttggactgattatcttttggcattttatattaatccttggtaagtgatttttttttactgtttaacacaaactctttaaaagttagctttcaagaagtaaacaaaaaggaaagtttctttttaactattttgtatgttcagtaacatctaaagttattaatcatgtattgaagtgaattaaagcagttaccggtacaaagatattaactataaggttttccgttaaatttttttccgtgatgttgttggcaagcgttttttcccatttagtactagttatttgtttcttcattgagtcaatccattggcctctcatctttgcaaataatgctttccattttccattatcatcttcatccattagagagctccaaatttccaagaaggtagaaatgcattaagatggagaaatcagagtctatacaatcctctgtatctgaggcctccttgtttttataataatgctaactcagtgactattaaacagctgactatacgcaagcctctttgtatgattatctgatttaattttcccccgcaatcctgcagagagtattactagtcccattttagaaatgtggaaataggggcttacggagatttactgtcttagtagcacattccactatgtacagaatccaggttccaaactcaggtctctctgaaatctattctttcctctgtaaagagcagactcctttaatttcttattttcttaacttctggatcattttaataatcaaatcttgaagtgttccttttgactttttaatatgtaatgataacagtaaccttgaattctgagactaaagaattaagaactctttcttttcctgtgctataagataaaaggtagcagtttccaggggaactgacaagaaaatcattgtccttaaatattaatacctagtgtttaggtactaaattatgtacagacagatccataaatgtggacaacttgaaaaggtctcagaagaaaacaataaaaatatctcatagactggaaaaaaaatagcttatggggtggtggtgcgggtatgaaaagcaatctggagcatttatttattcaaaaagacaattgaccaaatgttctccagctcctccaaggacagaataaatacagctggcagaatttaggatttcaagttgcactggaaggaacataaaaaaggatttcctcaaaatagagattgttaattccagaattcatatcttcttttaaaaaaagagactagaggaaagcttttgaaacaaagtagacatgatgtgtaggtaataaagtcagaggaatgtgctagatgctgaggacccattcactgttattctaagttcattgttacagtttttagtatagggcttcagcacagtcaactccgtattttcagtatttgacatcaaatagttttcaggtatgaatagcacacataaattccatttcaaccttcaaaatatacatttacttttaactgaacatctactaatcatcctcaaatagtgtgcctaccattaaaatactaacagcaaatacccataaagtatcccagattgcaaataaaatgaaagaaagatgcatatatcatttccttgcttaattctctgagactttctcattttccacagtgcgtttttaagcttctgtaaggtaggcctgtgcaagtaagcatgtattccttaataggcctcattgatgaacatatgctcaaatttcagcaaccctcacaaggtctgctatttctaataccaatcaaatagcacgaggcccaacttatggggagaaaatacccttcagtaatttttagaagaatcaccttgaaactgtaaatggttgtctccagttgagaagagaaggtaaaacatagagctgcatgctttctgtaacttcagtaaatttcacacatatcaactagtaaaaacatactggatataaactatgttctcagcccttttgtacaatgccagatacaaaagaagtgaaattcatgctccccgctcgtggaaatacagcttctactcacacaaccactccaattccctgtttgcttcatctaataacttgtggttattttcccctgctttcattggctaaagagtcatttttaatcctcctaatgatgtgtttgtcttcatatttcacctaccctgtgaacaacagctgcaaataacaagagccatctccccagacgcacactgcctaacacactgtccaacttcctttctaaactgtcggtttcttggaaatatatgttcctgttgattttctaaaacccatctgatgccactagtggtttgtgtggaaatcaaaaaactctttctctctctcatagtgttgctcgaatctcttcctggggtggtagcagaatcagtgtggagcaccagtacccagttaggttggtctcaggattgtgttctgcaaggatttctgactttcagaacttaagagtatgtttcctattgaaagaaatcatctaagttgaactagctatatctagattcagtgttaaatctttttttttttttttactgccataatgaccctcatgctgtactcaggtatttatctgcttgttctcaatcctaggcagttggcattttaagcaagaagtggcatttagttgaaaatgctcagctttactcctgatgattgcacattctatttgaagaatgatataatatactaaagtcctttttaaggtttggggatggtttctgcttagctcatcaaagagtaagcagcacttacaaaattggagacttttagagttttgttttgtcttgttttaactattataaatctcatgtccttgctattgctttttcggaatgaattgcagtatggatggctttccaagactgtcataaccatggctaatttatgcagaatgtatcttaactttttgaagtcattaggattttgaaccttacctaatataagtgaaagagaaaaaactaaaagtgcacaatcctctatgcatatatgctgtaggtatgtctgatgggggttatttattgatttggaaaatcttttgcaatgaaaaggcgaaccctacatgtcacacaaaatcgtcactgtaacatgtgcacatattggctctttccagaatgtgcttaagttaaaattgctagcaaagccttaatttgcgtgaattttcccctggttttagtctcggaattagcacagcaattgaaaatgtaggaacattttatcagtgttgctgtggagtttcataattcaatcctgtcatgttccacagccttaggatacagaaactccttggaatcagcaagatctaaatagaacaatgaaaattgtatacaaatcatgattacttatgccaataagtatatgataatatgtcatacaaaacatgtagtggaattatacgttatattgaaagttcattcaataatgaatgagattgaaagaaaaaaaatgtgtctctcctccatgaatcaagtttctacgcagctgccgagtagtagcagcttaatatttcagcactgaatttattcagtgttaccctcttacatacatttgttacttcctagtttcttttaaagcctgtttggataggaaagtatttttttgttcactcctgatcacaaaatgtgttggcagcctcctgactttaccagagctgttagtcatctccgctgacattctgctttccgaaagcactgaagtaattggctcttactacaggaagtaaatgtggaactcctaaaactaactaaattaccatcacggggctgaataaaaaacatgatcaataaatattcctttaggttcccaaatgcctataagatacagctatgtccaacatgatagtgttttttgaggggatcagggagaggcaaagtaaaaactggactgatttttccctctaaatctcaagtgtggaagacaaagaggatgagggagaaaaaatagaacaagaaccattgaatggattgttttcacttagaagtgggaagaaattaaaactacctgaaaaccacaaacaccacttgccttcgtggacgtgttcctacatttcttgacctgcattattttctcttcatccacaagtcccatcttttcaatcagaacatcacaagcccaagtctagtattcaattgttaaaggaatcattaggtgaaattcagagggtaacatggcagagattattttgtttcagttcaactgaataagcatttattgaccacccactaggtgtttcattaactatgctcagccctggggggaagctatagtgagtgtagcaaggtgtgtacctgcaactaacaatcacacaatgtgagaaactctccgtttgcaaagtgctgtgaaagcacaaagtactgcttcgtcctgctaaaagctttcaggaagtggagatatccaaacattcataattttaaatataaataaatatttggacacattaaagtactaagattacaactggttatttactatagactgtttattttctgaaaagttgggtgcttctatcaaaattatgtaaagacctctgaaaattacttgcaaaaaagtttgctgtaacatcacttgtacagtcaatcatgtttctgtatttactatttatagacaacaataagaatacaatcacaaagtgcttcaatagatactgttagccttagctaacttaggtaagttatcttacttggttgggtgaaaatcattaccttaattatctcctaaacaaatgtaactaactaaagcatgcattagcatttcctgtgtttgagcttatagactagtaatgatgaagagcaagcaggtaataggtccagttcttcagatagcttaaaaattagttcaagatggaataaaaacaacgccatagtagaattatacaaggtacatgtccacactgacagcacacattcacatccccagagaaaaatgtcagaaaatgttattttagtctttaattaagaaaacaacattccaccgtctctttattagttctccatttattcccccattcttccttcctgcctgtagaaattggagtgttcaggtggtagatagatacttctatatatttacaaactgctttagcaacttaatcaacagcagttagaaatttcatttctagaactcagtttttggcaaatgggaagtataaagtgcagatatgttcatgcaatctagtagagttttaaaaaatgaatctgaaattattattatcttctcatgtaaggaaaagtaaacaaacctgatatgtgtttaatgaaaattaaataaaactgaggtacctgatgtaattatttaaagctgttcaagtttaattattatgttaatcaattcttctgcccagataaatttgtcttttcttttttaattatcaggagtaaaaatggtttaaagaagaggaaactgacaaagtaagtttttcttactatgtcatttaaaaggatgtttgttataataatcttaacgttccaattaaagattgcttgtcttcaaagagaagggacgcttaagaaagaggcaaatgcatattacaatagctaagcacaataatgtactggttgtttatgcctgagtggcagtggccactagaaaagtgtatcacagaaatcacatcagaaataaggacaatgtttatcatatcaaatctgagagagtggatcgttagcaatttttaaagtcttggaggaggaagtatggtattctaaatacagtatatgaaaatctaatatttaactacatcaaagggtttcaaaaatccttttagtattttgaaattctgtgtttattgcaggaaaaggcttttactctatttgatgttataatagatactttgataatgctttctcaagaaacctgtataataaatagaaaagataattaatctagcctgtggttttccttatctattaaaccattaaatgagaagaattactattgtggtaagtgaaaattaacccccagttgatttcaaaagcctattagattatcacctccatgccttttcttagttataattctacatatgaaaagtggaactttcctttatatagagtttgttcttgatacctgcctggatagaacattggtgaattagtacaagaaggaaattagggggtccagccaggtctgtggcatctatgcttatggaaagaaatcatgagtaatccatgacataatccaaaagaaaagttgatgtaaaaatgtttctagttagtcttgagtggcatataattttatggcatatatgaaaacagaataattttttctaagtcaatttcattttttatttttattttttaatttattttattttattttttggagatgaagtctcgctctgtcacccaggctggagtgcagtggcacaatcttggctcactgcaacctctgtctcccaggttcaagtgattctcctgcctcagcctccccagtagctaatactacaggcacacgccaccatgcctggctgatttttgtatttttagtagagacgaaatttcactatattggtcagactggtctcgaactcctgacctcatgtgatccaccctcctcagcctcccaaagtgctgggattacaggcatgaggcaccgtgtccagcctctaagtcaatttcaaaccagcatacattccactggcttataccaactgatgtaggagagataagaccagactgaatagaggagagggtaccatcacctgggagggatgatttcacagaaacagaaagactttgttaccaaaaactgttggttgggttggcaggtgagctaaagaggcagagactagagcatttagaagatagcgtccttggacgaaaaggagagactgtcaaggcttgctcctcccatgactcaggcaaagaaaagaaggagaagcaagacccagacaaaagatagggtagagattaggagtggtagaacatacccacaagcaaaaaaaaactcacatcaattcggcttccaccttcccccctctcattttcctttgactcctctctccttctctagaagacatttcttgaaaggctttcctctcacctttttatttgccttctctaccatttctctttccctccaaatgccccaccactaccatatccccctggttcccattttctatctccacttgtcttcattccatccttcctttccatcacctcctctttttctttttcctctgtagatatttgtccttttggtctctactcccttccagctttctttttcttctccttgtcattctccttctcccttatgtccattcttctgtttgctattccttcctctctctctcttttccctctgcttcttgcttttacttcttttaacccattaatactttgtctggtttgccttctgtatacatgtgcccattttcctagtaacaagatgaaagctagagttgttaaatccaactttaaggtcgatacactgcccaaagacaccagccagagagtgcagttctaagggggttcattccaggagaggagtcccaactttagcccattcttttggaaggataacaagtttgaagtgggaaaagctttgaaccaggacttactctccctggattccagtgagaattctactgcttagtagacatgtgatgttgggctactcacttaactctcttagccgtggctctctcagctggagcatggagctaatgttgtctattcctacctcagggatcaattaagcaagataatgcatgtgactatttatgaagtgtagcgtgttttataaatgagttattgttattaagtaaaaacatttcagtttaaaggtattctctggaagatataacgccctctaaaatttactaaaatgttaacataaatgaattaatcagattagctaatcaacaactttaaatgagcattattaaatactatgtattttctaattggacataagaccacagttaggccaggtgcagtggctcacacctgtaatcccagcactttgggaggctgaggcaggtggatcacttgaggtcaggatttcaagaccaccttggacaacatggtgaaaccaaatctctactaaaaatacaaaaattagccaggtgtggtggcacctgcctgtagtcccagctacttgggaggctgaggcaggagaatcgcttgaacctaggaggcagaagttgcagtgagccgaaatagtgccactacactccagtctgggtgacagagtgagactctgtctcaaaacaaaacaaaacaaaacaaaacaaaacaaaaaagaccacagttagatgatataagctgagtaacacaccacaagaccaagggaagggtcaactataaagaccctgccaaagtggaaaggcttgagttagatgacagaatgtggaattctgcagaagcagagagctactttagagagcaaattggtttaggtaggctctagaggagataagcagctacagaaaactacaggagataaaacttgattcttattctcaaaaaaaagtgagaacttctgctgcggatgcagaaacatagctcagatgtgttacttgattgaacctctgagccatttccatacttttatagatatgcaagcctctaaagataactcactccagtgagaccctgggagctttctggacaaaagtttcatcccactgatcctgcctctgctttggggagactgtagctagcagcacaattccttatacttgtaaagctgttgaaacttacaaagttctttatgtactgtatgtcaaccctgtagctgtaactactgtattttatggatgagaacattgactctgaagagttaggcgattctctaggataacacagtcaataaagcaaaaccataactcaaacaggtctttggaatccattcctttgttattttccatatgccagagttttttagaagcaacacagatgggggtgtgtgtatacgagtatgcatatatatactactgtactgctacagtaagagccaagtggaaatctagagatttctcctatcaaggaagctggatatatatgcccttcttttcaattgcaatatattaaggattggtaacttgaaccaaaaaaaaaaggtgagtgctaaccttagagaagtaaaacttctattttctccaagaagattaagaagtatgatattaaacaatatataatacctatcaacaagaattttaaaatgtatgtatatttctttgtgtttggcaaagcccggttcaactggatgactttgatgcctatattaaggatatggccaaagactctgactataaattttctcttcagtttgaggtgagttggttaaggcattttctaccttctgtaatggaaagggcctgggaattggggggtttgtgttgcggtcatgtccctgctcactggcagtgcgtaacaaaaagggtattggcctggggattgctgatctgctggtttagagcaagggttgtcaatccttgcttagtaggcaaggcctcaggtggcacaaatgagatgaggggaagaagagaataggtgcaggtactgaggtgagcaaacatgggtatagtagaagccatcattgaaaaccagggaaatcgagagtacaagaagaaaaatgcaagctgaggcatgaagcctgagacagaatttccctttcaggggatttgtagtgtttctcatgcttcttaggccacagtagtggcggatagtggataaaactgaccccctttgtgtcctgggcacataacatcctggagtagggcttttcaagctataggactcctggcattctacttaataacttttgtgcagttttattttctttccttggacaaattggggagataaagttacacatgatttgtgttaagaaaaaaattgacaacatctctttttttccgaaggacacatatttctttggatctaaaaccatatgtcagaagagatggaagtgagtgagtctaatatctcagcagtgtgggggaagataattagttctcactttttctttctacatattttatagctcataacacagtctaaatggccccccatccttcaggtttctatagcatggcttgagtggtcagtgattcagggaaaaggggaagataaagtgatttttctaaattctgtagttttttttttttataaagccttttaagtgctcttttctattaaggtagctgctttttcttcagtttttaaaatcatttctcctttccacttctcagccaaggacagctttagtctgcaaaaagcatcagtggtcctggtgtggagacactaatggggaatttgaggatgagaagaatcttatacattaccaaatacaaagaccgctaactaccacctgtgtcctgaaaaattccacacagagcctgctcacttatccattgtatccaggtgcataggatattatagatgctacaccaaatgctatactcaaagaaattcaatttgaattggaaatgaatgaggaggatggcatttcagaaagtatatcaaggaaaggaggactttttttctaagcaaacatgaggcaaaactctgaaaaaataaatagctagatgattctaacgatgatagaaattatggtatagctacacttttaccttattaaagccacattttcttaattccttcaagatggcatgcccttggtggcacagctggatcataacctctgctggcaactcacagtttatgtcttgaaacccaagcataactattactgtttctgaattgcatgaaaaaaaattcaacaagtcattttccagtaaacatattcttttagttgtgagtgacaaaaacatagctcaaacttgtttaaactaaaggaaagggggtttattcaaaggatactaaggtatctcatacaatcaaagaaaaggttgagtagctagactacgtgcagggaagcagcacagtttcagggatgactggagccaggggcccctctatttctcatttctgcttctctctctgttttggtttcactttgtttcactgaacaaagagaaacaaagagaaacgcagccagagagggcagatgtttgtgttcagtgaaacaacaaacaacctctttttctgtcacttttgttttgttttgttttgttttttgagacagtctcactctgttgcccaggctagagagcagtggcgcgatcttggctcactgcaacctccgcctcccaggttcaagtgattctcctgcctcagcctcctgagtagctgggactacagttgcccaccaccatgcccggctaacttttgtatttttagtagagacagggtttcaccatattgactagtctggtctcgaactccttaccttgtgatctagctgcctcagcctcccaaagtgctgggattacagccgtgagccacgatgcccagcccaacctctttttcatagtgaaaagcagccaacaacaacccttgagcaccacagccttttgtttccatggtttccaaagggaattactgtctgtctttcttgtttgtagtttgaaaattaacaggggaggattttgatggacgagcctgtgtcatggtgcccattcaaaccaatcacagccagagagggcagatgcacagaatctctaaatggaaccatgtgggctcaagtagcaaaacctaagaagggcattatctcccaataaagagagggtattgggagaaccaaaccataagcgattagcatgctatctttagatatcacaaaaatatgaaaagcagaattataaattttatgtgctaaatgttcaatttataatatgctgagggcttttattcattcaatggataaatgaatacatttagcctgacttcataggatttataagaaatgtgctaaactaggaatctaaaatcctgaatcctcactacagtgttgctactaattaacattctaaaaaatatgtttttttcttaaccaattgatatataatgagtttggggtgggcttgggggcggatgatgtattagctacagattttttatgtagtgaacatgctcatgtataagtttcaatttatccaactactttgttggaataattcttatggattgaaactgcccaggcaaagtatatacaaaatctgcattttgagtaaatttcccataagtggagtaagttttcccagtgttcctaaaactatacaaacagtatagtatagtatatacttcctaaaactatacaaagagtagatatcaacatttgtaatcattgataatgtaatattacaaagaaattgctttctcatctgttaacgttaagctacatcatcttcatatagcactattagtcatttgtgttatttcattttcctctgtttcttttattttcatgtaccttataatcttcatcattttgttactgatttctaacagctgatttatgattaaagaggttaacattttgtgaagggctgaaaatgaaataccatttttttctcatttttttacattggggttttatttggagtttgtacagaagttgtgtatttaaaaaataatcatgttctgcttttttttaagtacattttctcatcaccttagtttctttatgtataaaatgggtgagttgaactagatcaatggttctcaactggacaagtaccagtcagcccccagatgaaatttgaaaatgtgtgggagtgtttttggttgttataatagcttaggaggaggatgctaacagtattttatggaagagggacgaggcgttaaatgctcttcaatgagtgggacattcccgcacaatagagaattgtcctaggccgaaagtgtttgattgagaaatatgggttaaatatgggatgaggctacaatcaagctttataacccatgtgtattagtcatgggttctccagagaaaccaatgggatgtttatatagaacaaatatgatgtatatatagagagatctattttaaggtattggcttttgaggttatggaggctgacaagtctgaaacctgaagggcaggctggcaggctggagatccaaggaaaagttgagtttgcagttttgagtttgaaggcaatggggaggcagaattcctccctccttgtaggacctgtctcttctcatcaggccttcaaactgactggatgaggcccagccacattacgtagcataatcagccttcctcaaactctacttacgtaaatgttaatcacatatgagaaaaacaccttcacagcagcagactggtgtttggccaagcaactggacactatagcctagtcaagttgacgtctaaaattaaccattacaccacgattttaaagtctttaatattgttatttattctgatgctctcttcatacatttctattcttagaacattattggtcatatatgtaattaattgggtggtaagtcctgacattatttacatattctggtaggaaaatacaacttactctctagggctctgttttaagtcacaggcttagactgtatgttttggactaacatttgctcaagcagtggcccgctggtccaatttacttccttcttcatttgacagacttcagatattaccagtcctcagtcccattctgccccctacatcctcagggtcagcgtcagggtttcctcatcaattttcatagaagtagtgtgctcccatgcctgatttcaggatgtatgctggacctttcacatggcagccctcacatttttttgaaatacattgatagttaattgagacttaaggaaaaaaatgttcctaactctaatgagaattcaagagggtatgagatggccaaatcaccttggtctagataattccagcagctgaacttgtacttgttctgtttatattaatgcctagtatttgtattcattttgatactgacattgaaatatcacattcacattgagaaatcacatcatttataagcattttgcagattgaaactaatgtctggatttatagatactaccaatacagccataagtcatacatgaagctatatgagttactaatttgtgtttactgaataaatttcttttttactctgaatctgattttaaatctgctagaaagattgattatccttctgataaaaatatacaccgttcctttaaaagtcttgggacccagggattaaaataggttcctcattttttacatttcacatgggaaagattttgaagaaccagactttatagctgaaatgtgagagcccagaagacatatcacatattgctcattctgctattaatgtctgtgcttagtgtttgatcaggatactagtaaaggccctcaccatctctgttcagacatgtggctgcaaagatcaaaacaaaactacagaactggccatgcagttcacaagaggtgacctttgatttctggtagtagcttttacttgctatagatggaacctcttctgtcaacaccactggcactttctttctcctcactttttccaccccttatggacacgtaatctagtaatcttagtattgtttgaataaaccccctttcctttagtctaaactagtttgagctatgtttttgtcactcacaactaaaataatgtgtttactggaaaatgacttgttggattttttgtaatcatgcgattcagaaacagtaatagttatgcttgggtttcaagacataatgtccaccctatcccaaagcaaacaccgaaagcaaactctcacctgctgacattgttacaaaccctaagaccagaatgcagattgtgctctcctcagaagatgatattgcaggttatgggctgaatatctgtggccccccaaaattcctatgtttaatccctaacccccaatgcaatggtatttggagatggagcccttgctaagtaattaggattagataagctcatgagggtgaggacttcgtggtaggattgttgcaggacttttccttagttcagctaaagatgaggtccttgtccatcccacagccatgaaaatttaggttcacaggcaatttggagggtgagtaaaacagggttttattcggtgaaaaggaagaaaagggagaaacagggactctcactaggctggagtccctgctagagcacttcccactggcagcttgaatctcaggttccacacaggaagaggagaggccaggttccttccccactgcaaacatggtgaacttcccgaggctccacctctgtgagcaggctagttggaatttctccaaggaccccctcccacctgactgtctcaggatcagccaagataagatgcctaagaatgaaatctaccttgttgccatcttgatcttggacttcccagcctccagaactgtgagacataaatctctactgtttaaactatcactctatggtgttttgttatggcagcccaagccaactaatgtaatgtatatgcttgtgctttgctttccaagacctgtatgcttcaaacacagccaacaaaacgtagcctgctactgggtttgggtgaccgtattagttcctatggctgccataacaaattaccacaattgtcgtggtttaaaacaacagaaacttattctcacaattgcagagccagaattccaaaatcaaggtgtcagcagggccacactccccctgaagactctagggaagaatttttctttgcctctttcagcttctgttggccacagcaattccttggcttgcagctgcataactctgatctgtctccatctttacatgccttttcctcttctccaggatgatctcatctcatgttctctaacttaattacaactgcaaagacactttctccaaattagatcacactcacaggttctgggggttaggaggtagacgtatctttttggggatcaccattcaacccactacagatgactgtatagcctagaagaaaagggtgataaattatatttagaaacaaaactgacaaaagaaaattcagaaatgatttatgtgggtttcaggtccatcactccatagtttgtcttcataaagatttaagccagtggaatttccatatggttggaaagaaaataacttcaaagctgctgaactggaaacttaatattttattttccacttagtgacaggctaaattacaaaggcttcaaagcatactgtgtttacatgcagttcccactttgctgcaattcaactttggcaacttccacttacagtgttcagccaattaaacctctcttatcaacttagagtatttacagcaggaaggcaacacacaattaaagttctgtcagttagtcagcttccacaattaaagttctgtcagttagtcagcttccacatgtgctcaaacgctcagcctcaatctgtttccaccattccttttgtatctgaggccttttcccatggcttatcagtctgtccccaaagcaagagaattgggggaagagttgttggtctgctggcataaatggcagaggaggaagaaattatggagccaggcaaagcaaaacaaagaatcatcacaaaagtattttacaatgatcatcaatagtgctgtattagtatttgttgagttaaattattccatttgataatcactataaaaaaggaaggtgtggagaaattactagccttatcttacaggtaattaaagcaaagtttaaaagagtttaactacccttccaagaacatacagtttataagtggcatgtcagaatatgtgagatattttgaaaaaatatctatgcaggcattttctaaaggaggtagatttctgaaataatttaagcaatggaagcatcatttaaataaacttataactaccaaaaggaactaacctaaacatcacactgatttagttgaaatttactaaaaataagttgcttcttacaagaaaaatagagtcaacctttgaataccctttaaaatggaacactcagttataaaataacaatgggaagcatctgcctaaatatatttggcaagtaagtgcctgagatggaaaaaaccaattttgtgagttgaaaatcaaatgtaacatagtttgtatataaaactgacatcaacttagtccaaagaacttcagatattgtcatcttgaaaagccaaaagagatgaggaatcaaaggaagagagaaatctgggcaatttttgttggttcatccatgttggctacagtcaggcaacccaatgccattaagcgcaaggtaatttgccaccaaggatcttctagttaaaagcatcagaagacccaataacttgattaataaagcatgtgctttgcaaagagcacttgaataaagacacaaagggcatgaaacagatatccctattcaatcctagaacgtggtcaagtggctccaattctcttcaacagtgttaaaagaccctccgaaattcttctcctagggaagtattcctccagctttgattccttgaagtaataattgggaggaattatgaagagtaaaacttgtgctcaatattaacattctataaatgtaaataaaatttataacaagtgatttttgcctcgcttagtagtcttatagaaagatgcacactatgtgggtaatcccacttatacacagttatgtacactgtttactaacattcctctaacatttgtataggaatataactagatccactgcattggttgcacattgtacaactccagtgaacaccgttcatatagaccacaatgtgaatgatgcctccaagaaatacaggtggcctgaccgtaatccccgtttcctgtaagacacatggcatagcaacttagaaatccccctttccccataacataccctttttgaagtgtgacagttatttatataaaaatttcccatcagttcaccttctgaaatgaggtttataagagtaccaatatacgcaggcagacatttggatgttcttattctcactgaaggattttccccaacaactacagatccatctttatgtttgaggtttcattaccagatatttagtgactgttaatcccatactttgtaacatggagattgttccctactcattcctcactattttttactactttctctaaggctcattgcctacaagaaaaaaaaagcctagatttcttcagagaataggaaatatttatacaaattgcataaacttaagttactctattcctccaaaaatctgaaatgcatttttattttcaaatatttcataccctgagtgttatacatatagttcttacttctccaaatgaccactaagttatccaaggtatttatgtgttgtattagatagctattaccacaataatgctgtataagaaacaacctcaaaatctctacaataacatttacttttctcactcatgggtctgtggaacagctggggcagttctgcttcaggctgtgggtcagagtcaggtctgccctatgtgcctcctcattctcggactagcagcttccctgggcatgtctttttcagggtagatggcaggcacacaagagggcaaaccaaacaagcaagtgcattgaaagcttctgagtggacttgatttctatctaagatcattggccaaagcaagttgatgatagtggggtggagtaccttccacctctaaagggagctactgcaatgtcatatagcaaagggcttgtgagcaataaaccagttgaacaataatccaattcacaccacgtatggaactctcaaatccattctctgtcctttacaggagttgaaattgattggactggatatcccacactttgctgcagatcttccactgaatcgatgtaaaaaccgttacacaaacatcctaccatgtaagatcgtcaattgtgccaataacactcatgtcttaagggttgaaggactgtcattgcagattaatcaatttcaccaatctctggccatacccacttgtggtccggatctcaaggccacgtctgagattgcattgatctcactctcctttgatgtctttagatcttagcatatggaggaagatttaattattgtgcttttaaatgaattgcatctgaacaaaaagactgatcatttggccctttagagattaaagagccacagtcaaattggggattggatcatttgtactctcataaaatattttcagccaattcattggtaatggaaagaggcaaatgggaaggcgatgcagtatattaaaatgccttctctaacttctgacaagttatatagttgcttagcattttgtaataaaaagcagcattcaaggaaaaaaaggtaatataaagcacttacaaaacaattaaaatacattccagtttagatttcacttttctctctgctacacgctgtggagctaggcatgaatggaaaagtgagaagagaaaggctgaaaaagctctagaaagagaagtctcttcttgatatggtttcttgatgaaattagatatattatcataataacacttcacatctgtacacagttcagaaattacttctttaatttaatgtccacctacaaaagaaacccatgcatcttctgttctctaggtctccttaaagtagtgaactctctggatatctctaggtgaaatgaaaatcgtgtgcttaggctatatactatagctgtccaatcaatctcacagatattgtagttcctgaaatactctgaacaacacctaaacaatcctggaaacaattctttcaaggacaggagagctggtagtgaaaaaaaaatagtggttggaagatattcacttatttatttaaacaacaaaccaaagttgaagaatagctaaaatatcaggctaaaaattattatctgcctactctgtcactgactgatttaacttaatattggatagaaagggccaaaataatttttccttccatcttgaattttaatatttttttctccttattctctacagatgacttcagccgtgtgagattagtctccatgaatgaagaggaaggtgcagactacatcaatgccaactatattcctgtaagtagaaaaaaaaaatcaggcatcccaaagctaaccagccagagaaagactagcagggctatatggatgtgtcaaacagttcaaaagagagcctttcccaacccagcaattgaattctaaaaagtttgcattactccgtttcataataaagaatagaaagaaaaagtccatagattactaatgtttctatttctttataaaggtccagtgaaagggaaagtagaaaggttaaagatcacctctcttatgtttaaatttcacattcagcaaccaaattcaaagggttccaccctagcacctgcacttttaaaatataaagacagttattattgtcataaaaaggtgtggatgtgatttttacagccttctggataacaatgcttacaatcacacagactaattatggtcagttattctgatagcctctttgattaaaacaggagaaaacattacataggtgtgtgatcctttgccaattttatcaccagtaagttttcagtttttttcccataggcgtgaagcagcatttggtgttgacagtgtctggttaggtgataattttgtcacttatctttcagggatacaactcaccccaggagtatattgccacccaggggccactgcctgaaaccagaaatgacttctggaagatggtcctgcaacaaaagtctcagattattgtcatgctcactcagtgtaatgagaaaaggagggtacgtacttactgaaactgctcccacttagcagcaaaacctgccctagccactgccgttgatgaaatgcttgctgttttcaaagtcaaataaaacatagagacaaatcgctaaatttaaaacattgtattcgggaagcaagaattagaatttgggggtaaacacacagacccggtggtctttgcaatgtctaaaggaaaaaagagaaggttggaagtcttctaaaaaggagaaatattgcatattgttttgcaggaaagttcattagcactagtaaagttttggggagctggcaagctctgattggtgaatgcatggtggtgggtaaaactagtctcagagtcccaacaggctgtttcagttgctgttagataccactggtttcaagttactaaaggcagtttcagcaaccggggcttacagagaattacattcctggaacaatgttatgcgttctgagtgctttcttttttttttttttttttttgagacggagtctcgttctgttgcccaggctggggtgcagtggcacgatctcagctcactgcaaacctctgcctcccaggttcaagcgattctcctgcctcagcctcccgagtagctggggcattctgagtgctttgtcccctgacccctcaactctgttttagttagatatgataagaatgacccaagtcatgtgataagaattcacactacgtagcagaaatggtttgctttatgtttcatcttcaccacggtcctatctaattctttagaggcgaatacctttgttttccctaagtgagcacacttaattcctttcctagcctgtttgttttaaaaaattgttttgtccttgctccaggtgaaatgtgaccattactggccattcacggaagaacctatagcctatggagacatcactgtggagatgatttcagaggaagagcaggacgactgggcctgtagacacttccggatcaactatgtaagtcaccaggcagagagcaggtgctgtccctatgctgacacctgctgagaccagtttggtcggggagaccctaacccagcggcgctagaggaattacagacacacacacaaaaatatcgagtgtggagtgggaaatcaggggtctcacagctttaagagctgagagcctcgaacagagatttacccacatatttattgacagcaagccagtgataagcattgtttctatagattatagattaactaaaagtattccttatgggaaataaagggatgggtctggctagttatctgcagcatgaacgtgtccttaaggcataggttgctcatgctattgtttgtggtttaagaatgccttaagcggttttccgccctgggagggccaggtgttccttgccctcattgcggtaaaccgacaaccttcagcatgggcatcaaggccatcacgagcatgtcacagggctgcagagattttgtttatggccagttttggggccagtttatggccagatttgggggcctgttcccaacagacacctacaccaccaccaccagggaagtgctgggagaccaacccaatgagcactttgagctttgcattgctgcttccttcaagaggaaaaatccattctcagtgtcattgtttcccatttcatcagtgatggtgtggatgatatggttggtctggagaggctgagaagacgcagtaaaaagtctgcactagttcatctcgaattagctcaagatcatagaagacactattaatcattgtttatgaggcatcattgaggacagaagtgttctcattacttatattaatcatatatgagtataattggggtatataaggcacacttatgttttaaattaaataattaaaccctgatttagtagtttgggttttgttttgttttttttcttgttttgttctggtttggttttcattatttgtaaggtacttctaggtcttattatcataattccctatctctcttgaagggctattgatttctgatggataacacatccaaaaaaaatgtctgtttttctcacaaggcctgacacctttctgctgacaagtctctgagcaaacgctgaatatttctgtgacaggcttaggtgttaacatcaattgaagtcatgccattgacctcagcctatagaatatacagtttttactattaatagtcttctccacttgaacatgctgtctatgaagacaaaattgaataggaaagttctcactgagatgttcttccctgcttagaaacaatcctttctaatagttaaggaaatagcaaactgtagcctgtggaccaaatttacccactgccttttggataaagcccatgagctaagaatggtttttacattttttaatggttgaaaaaagacaactgagtatggtggttcatgcctgtaatcccagcactttgagaggctgaggcgagcagatcacttaagcccaggatttcaagattgcctgagcaacacagggagatcccatctgactaaaaattcaaaaattagctggtgtagtggtacacacctgtagtcccagctactcaagaggctgaggtgggggaatcacttgagccccgtaggtggaggttgcagtgagccaagattgtgccactacacttcagcctgggcaacaagagcaagactctatctccacacacacacacacacacaaaaaaaatcaacaagaaaaatagtattttatgtgaaatgctatatgtaaattatgtgaaattcaaatttcaatgtccatatataacattttattagaacacagcctgcattgttgacgaattgtctatgactgcttttgtgctacatcaagcttgagtagctgcaaccaaaactatatgatctgcaaaaactaaaatatttactaactgtctctttgcagaaaatgtttgctgacccttaaaataggcaatggaaacaaagattgcccgtatcaatacaacgttagaacttgatactacctactgattgatctctacaggagataaatcacttcttagccattgttaattgccacttgttaactggcagttaacaatgtcttttatgaccaggagaattcaggcaaatccccgtatgactctaacaggctgtgtttcgtgttgtttcggtcatttaaaattcacattgcttccttgttaagcacgtttttactcaaatgcagagtttcagcttaagtgtcaccccctttgtggcgtcttctctgggcttggacaccgttagcccattccttctctggggcagagtcttaagtaagctgctttatcacagcacaccatagatagttacaattctcgcttcttgtgtctgcctccccagtatactgtgagtttcagaagcaagtgctgtatccctgtggaatgaataaatcagtgaatgaatgagttatttcaaaaataataaggcacttgtaaagcatcaatagactttccgtcagagaaaatatttgtcaatccaaatgccatttgaactctgttttttgttcttagatatttcaattgaaaagccagtgcaaactgataaccaaatacagtacaaatctgtccctaggtttgcacgtagtagaaaaaatttcagagcacaaaatagggtctgttccattgcctattctgttgacaaagaagagtcacatagattattgcttggtcagtactatgcttcttgtccttggtcttaagtgatgacctatctttcaatgacaatcatgtgaaggacttgaaaaataggaataaaacattgaacagtagtgtttgtttgtaaggaatttacttgttacaagcgtctggtaccagagtgcccccttttggccataagcataatgaatctaaatgttaagctacaatgaaggctaagttgcccaaagaacattgtgctatgctaattaatatatttttcaatttgtttcattttttgtttatacccttctttatccattccatattgatatgtggaaactttccaattataaaaagataaaattacataaataaggaactcaaggtaagagaaatttaggaatagctaagtaagataaaaccagaagagttttctcctttaacaagaaaggagagaaatgaccataacacacaacttgtcactttctactacttgaaatttggcatcaactgagtgagagctggagactaaagatcatcaaaaacgtgtttgttgccagggactttgtgccctgctattcagctcacagggctgaccccagttccaggacccctgccgtgtagctgcggagaaactaactacaatttaatgatttcctgattttaaatcaccttgcactttttaactgaatacattttcacttcaaccgtactggaatatatatattggctacaatgtacacatgttatacaaattatgatcagcatttaaacagggcaagcattttcctgaactttcctggcaaccaaagttatctggtggctgagtattcttaaatcctcatgatgttgaataagtaaattattctgcacaattctttatgcccaagatagtttctcaacatacttcctgaagagagcagtgagggtagccagcgtctttgtagacttcatgttctgtgtgtctaagccagagcccttgaacatagtaggggaggcactgcatgctgctggggatatattaggtgccaagggtacaatgggtgtaggggaggtgataacttatgtatatttaaacaaatcttacatatttatttatacattttatttatgaattgtctttatacgtttattttctgtccaagaccactgactctttgaaattcatttctctttcaatacctgaacttaaattttagctcaaaactgacagcgaggccaagcttccctccttcccagttatgatatagtattccagcctctgagtgaattctaggctcttcacaagtttgagaactgagggatgaatcagacctttatgaagcctgggtttgggatatttctgatggctgataacaagtggagaatatgtaactcttacaagttagttgggactaaaaagagttgatctggaaagatatacattctagttaatatgtactcagttcagagagaacaacaatatatttgatgtatgggttaataggaataggaaaatatacaagttatactcacttactggggactcccagaatcaaccatacaattgcacggagctggatgacggtgagtgatggtaatgaggtactagtaagtagtaatatcacacacatgattacacttaattcacacaacaactcttgttataagtatcattaggccatttttagatatgagaaaactgaagctcagtgagtcaagtcctctagtatcaaagcccaagacaaggattctcatataagtgattttgtgaaagtgcattcttagggaaagcccataagggagcaagggaagcagattgacagagaagaagccctacagagcattcagctgaaaatctcacctgtgctggatcccacagagagtgctgggggcatgaacagcaccatggtactgtctcactctgaaaaaggctggatttttgtaccccacaattagtcagtcattagctgtgggcttccctcagcaggagaacgcaacctcttaggcattttctatcgaggcagctctgtgcagtggaaggcaactatcaagagataggtactgctgtgctgttagcagcaactgggaaaagtgtgtcccaggctggcaaagtgtatctaaagggcaccaacagcactttctacagtgtttaattcattagccaaaactgatgcagcttctaaatgacagagccaggatgcaaaccctaatctgcttaagtgttgtccacaggtacagattagcctacttatcctactatttgaagctttatacaattagcgtggttttttttttcaatacctattttatgccagatatggtgctcaaagctggaaaggaaagtgtactgaccaggagtggaacgtggctctacctttttgcatgcttaactagcagagtcctgggtcatcctaacagtgaactgaaaaattaatgcttgtttttggcttttttctctaaaggctgacgagatgcaggatgtgatgcattttaactacactgcatggcctgatcatggtgtgcccacagcaaatgctgcagaaagtatcctgcagtttgtacacatggtccgacagcaagctaccaagagcaaaggtcccatgatcattcactgcaggtaacctcatcaactgcattttctattaaatattaggagttggttttgtaaggggaacagctcaccattccataagcccttatcaggtttagttgaaaattaaataaactctgatgttttttaaactatgattaattgatgtctcactatatacaatgtttattctggctttcctgtatctataccctataaaatagatgttattattccaatttttaaatgaaaaaaatagagaagggtagagatgttaagggattcacacaagttcatgcaactagaacatggaggagttagtattcaaatccaggcatgccaatctgcaaagatcatgcccttaatatgtgatattatcctactccatcaaggattctgggtagttacaacatggacaaatacaaggtcaaattatagaaagctgatcacagcttgacataatataaataggcataaaaactagaaaaggaaaagaaaaatgaaaatattcagcttaggaagataaacatatttgctatgattcctcttcgggattgtctcttaaattgtcagacagtagaatgaaaaaggatataggatataaaaaaatcaaggtccacactaattcccaacaggaaaagttatcattaaatttaatttgttcttcctactgtatgaacagagctccatcaaaatctatctctgtgatacaatattgctgtaaaatccttatgcaacctcaaaagaacaggggacataaacgtgctccaatggcaagtgagaggtggcagtgggatgaagatgtgaagggaagcattggcagccatgccaacctaagcaaataaatctacaatcccagacctactgccttggcccttgtgaattagaatgactagaatgaggaagtatatgtgtgcattcatgtgtgtttgtgtggagtgtgtgtctccctggaaaggaaaatgcttcataagctactaagtttctgtttagggcagatattgttgctgtcaatccactgtaggcattcacaggttaaaagatgtgctttagcaggtaagattatctgttctcaaaatggttcttttcaagaacagaaaatgaagctcttcaactctggggtcaaactcacagattcctttcatggaagatagtaagtgcagttctggatatgactttacaggtgctcacccaatggcagatcattttatctgagaaatcctgggagggaagagttgtctagtagaaaaagcaacccttaaactcaaggtttatagagtgggatttttctagcaaactttccatataaatttgcttgaactttctcttttcccatcatttcacagtgattcaaagctaagagccatttgactctttattgaggattagagggaaaaaagggctgacttcaacacatagaactagggactgtgatgggcagttggtcagcgcatgtcagtccacttccatctgtgccccgagcattgggattgggggactggctgagactgggtccaaatttttcatttgattttaaggcaactatctcaaaggtccctgtgagatggaagcaggcccaggacccactaaaatggcaggcatgctgtaaggcaggtctggggtggtgaactgaacttagggttgaagatacacaaatctctgtggtcccagacctagagttagggtatggacatctcaactggagttttgagctgatctgagggcttaactctgatgctgttcaaaagacagggtattgtttatgtgtatcagctctctgaattcagaaatcagttcccgagagtactcaacatggaatccctacttttctgcagaagcagagaccccgataaagggtgtggccaatgcagtgcaaatgtctctcaggaacgtagccatgatagtcagaaatgtgacattagaaggaacaccaaccacaactccatacttaaaaatcagttaagtggaaaatattgtcaggagcttagtctgcgtttttccacaagggtactatttgtagttttttagaaatcatcagttttatttcaacagtaaagtagcaccatctgggctggccgaggtggctcacgcctctaatcccagcacttcaggaggccgaggtgggaagatcacctgaggtcagaagttcaagaccagcctggccaacatggcaaaactccatctctactaaaaatacaaaaattagccaggaatggtggcacatacctgtaatcccagctactcaggagggtgaggcaggagaatcacttgaagccgagaggcagaggttgcagtgagccgagatcatgccattgcactccagcctgggcaacagagcaagactccatctcaaagaaaaaaaaaaaaagaggggggagaaaaaaaagaagcaccatctgaataatatgccatcggaacattcttttgcagtgctggcgtgggacggacaggaacattcattgccctggacaggctcttgcagcacattcgggatcatgagtttgttgacatcttagggctggtgtcagaaatgaggtcataccggatgtctatggtacagacagaggtaggaacataatctatatgtatttttaaattttccctggactgaaaaacttaccattattcaatgatatgcttcaaaacaattctctcaaacttctttgtatctttctttcccattttcttattgtatatgttcaaactgctttgaggcataaaagaaatagacactagcctccagaaatccattcgacatatagtgattatacttttattggcatcataattcagagtgcatgggtagattcgtaagagtaaaacctctttgaacagactcagagtcaattgcagataacagccatcctgggtaaatgccaccaaatagagactgttgaactggtgaaatttgatttatatttgaaatgttggatttgattcaatacatttgtcattagtttatcctccgtgtgactctatcccaattcacttttgatgatgattagaagttggatttgagctttctgtcccttttatgattttaaagattcccagtccccaacctaccagcattgccagttcccttcatctcaatgatgaagatttattattttaacaacatggaagcatcccctgaaatatccaacagtgttacgtgctccgtcttcctcctcttctcccgagtcctccctccctgaaagcctgaggatgcacttagtctggagcgacaacccaaggcaacgccggcagacagcaccgcctgcctcagagcagccgtgggtgtgtacccttgtgggcgcaaaaacccaagtacaacagcttgttcataagcctcatcacccagccatactcgcgacttcttagcttcggtcttacaataatcctttttctcaaagagtatgtgtgggtggagcgcttgggtagaacacaacctggcccgacctgtaatcagggtatttttaaaatgctttggtcttcctcatgcttttcctacccagcaccactagatgtcagtatcacttcaaaagcctagagtaatggcggccgtctcagctgtttctgctttcccactccttttacttttctttcctcctacctccccattcttgtctgaccaatttttggcaaggctgtttcaatacattcatttctgaactacagcaggatcataccacttgggaaagagttatcctcgttaatattcagacctctcattgataattaggaagcaagtccaattggtttcctcacttggtttcaatcatgctgcctagtaatttagtgtggtggggacatcagtatcactttttaatcataagtttaaaatgtctggtttcccagaggagtccactgtctggtgagtaaacagtgctttattaatcggtccatatttttggcttttacttccataaatttgcaccttgatatgtgattaaaaatccacgttatgtatatgaatcaccaagcttcaaagagccacaccttattttaagtattttgcatttaatgaattgtctcctcaatttacttaattcataccttttacaacttcatagattttggggcctggcgtagtggctcacagctgtaatcccagcactttaggaggctgaggcgtgcggatcacctgaggtcagaagttggagaccagcctggccaacatggtgaaaccccgtttctactaaaaatattaaaaaattagcctggcctggtgatgggcacctgtaatcccagctactcgggaggctgaggcaagagagttgcttgaacccaggagacggaggttgcaatgagctgacatggtgccactgcactccagcctgggcgacagagtgagactccatctcaaaaaaaacaaaaaaaacttagtagattttaattatggcctgtttgcttttgacttttctccaactacagattcttaatctctttcacatgacacatcctccatcccatttttagggtcattatctttctttgggtggttatcaagcagccaccatgtcgctttctgcaaagccaagaaaacgttttgttttctccctaaatgttttaccctaaattttggttgttttatttgtttatgccagcattttatgttgatatctccgcggacacagcctttttaaagtacagtatccccatcctggccaacatagtgaaaccccttctctactaaaaatacaaaaattagctgggcgtggtggcacacgcctgtagtcccagctactcgggaggctgaggcaggagaatcgctggaacctgggaggcagagcttgcagtgagccaagatcgtgccactgcaccccagtctggtgacagagcaagactccgtctcaaaaaaaaaaccccataaaataattaattaaaattaattatgaaataattaaataaaaaataaagtgcagtatcccttccctgaactctcatggggagttcaaagtcagcaaagggggcagaggttccccgggttacttactttttccaacttttctagcttgacccttgattcccgcaggacttcctggtggatgttttccagttccagttatttatctgtgtctttttttttaacttatgtctagaacatcttcttcatttacctttattttttccttgttcctctgcttaccatggttcatcccgtattttgaatacagattgatctgcctaagattctccttaagcccattcacattcaaattctgctgccaggtcacaaaagttaacaaggaaagaacaaagtaaaaaaaggttattcttttcacatgtatcatcctagagtactcctttgacgctaatgattttcaagagaatgaaatggttctccacttgagctctgtttttatgtatataatcaacccacatagaccatatttcctcccatcactggtatctaattttccagccttctctacattgccttgaccccaccattccacctcacccaaaaaattgcagaagtagctgataggatgagccatgtctccaggtgcaacatgctgcctggactgcactgtgacctgccctcttcctcttcctcacctgaccagacacacttcatagacttcttcacgcaagtagaggcgtatttagaaagaatgccagaccctgaggggagcctgaatctccactttactgctgcacaagtcatgtcacctctcaaggctcccatttctcttctgtaaaatatgaatgataactttcactaatttttgtaaagcagacatgatgggaaataatataacctagataagtgatttgaaactgtgaagtgctacttatgaatgatgttctcctctcttctatttttatcgaatattttgtttggttttcctctaatatccttccctggaggtcagttggggctttgctttgagcagcccatcctcttgatctgcagtttgaatttcgggactttcaaggacaagtccctccataaatagtctttatttacttttcttgtggtcttgttgtttggttgttttttgttttgatacaaaatgtagccactaagcagatgcagattgaatgtccaggcaatctctggtcttatctattccctgtgttgacataacaccagaagcaatggattaggtgtccatgtgtgatgaccacaaggggtagctcagccactgataggataccatcaccacaaaagggaatatattttctccaaaccgtgttgaaaaatacaggttaggctgaggcatcaatccagtgatgttcgaaatattaattttgttttttgtatgaagttgttacacaggaagcttcttaaaatcctatgaatattttgaccggatctcatttaaatgttatttctagtgctattacttatagagaaactctgggaaacaaagaaaaaggaggaacactgtgaaattacccttacttcttggcagaaagatatattttggtgatttcattttggctttcattcaagtataacttttacatgattgtgctcatattatatgtatgtatatatgtgtgttactttacattctatttacattgtagtttctcatttaggattttactatgtagcctgtatagtatcaaaaattacctacaactctataaatctcattttaaggacagactaatgtttcattaaagatacactattgcatacttaaaccaatctcctttttatagaacattaaattggattattttccactttttactattatctgtgtccacaccatttattagcactttattaattctacctccacaaacaataggtaaaatggactgcctcaacaaacttgtcatcattaaatattattcttttccttctagctttgtccactacatagatagaaaataattatttcaatgtactttgtattacttgactattgttggcatattttaatatttcctcagtttacttcaaaaatcatttaataaacacagctaagtgctaagcattaggaataaaaagacatagtttctaacttccagggaatatttggcctagtggttgatgtcctttacttatttgtctatttgtatatgttactgatttgaatgactttatcacaaaaataaaggcatcaatattctgtcataattctagaaaatatttttcttttccagtttgtggtttaccctgtgttttattctttttaactttttaaaatatacagtagattgagatttttatttgtaatgtattctactgctcttaattttagaaattcctttcctaaaggaatcagagagaaattaaccaatattttcctctgtatttttaaagacaatttattaaattacctggaatttgctttggtgtatgataatgggatatcctttttttttcaaaatagccccatgatttgattgaatattcatttcctttagcattaataatgatttaatgtacagcatggtgaacatagttcataataccgtattgtatacttgaaatttgctaggaaagtagatcttaagtgttctcaccacacacacacacacacaaatatatatacatacatatatatgtatatatacacacacatatatataaacatatatataatctggggtgatgaatgtgttaactagcttgattgtggtaatcatttcataacatatatgtatatcaagtcatcacattgtacaccttaaatatatacaatttttattatactgcaataaagttaggggaaaaaaattccactgtttttttaaaaaagccatgatgttctaagctctgttattaatcaaaatacttgtacagttgattctcttggattttctagttataaaactgtgtctctgtaaataatgaaaatggtttcctttaacaccagatcttgatcattaaaattgtcatagtataaaatattatatctttgcacatgtctgctctgaaacctgtttttgtcttttgttccaggagcagtacatttttatccatcagtgtgtgcaactgatgtggatgaagaagaagcagcagttctgcatcagtgatgtcatatacgagaatgttagcaagtcctagttcagaatccggagcagtaagtggagaagagctctccacgagtgctcagtcttagaactattagagggggatgtgatggatgggacaaaagacagcagtagccatttgtattgactctgacttcacatgagtatttcttcccagctcctggcctcacatgggtggtcacagggagaaacaagtactgtagcagatctttgagtttcaatgcaccttggttggtgttggcaacaaacaggagcttctgcacatcatgatgactttacctccattccctctacccagaaccctaaattattctgttattggatctgtgcctgtaatatcaggatactaccatccaaatctatctagatatcttgtgcaaatattttattgattacaagggctgtatacggggttacaaaaagacatgagctggattggacactcctaaaaccaaaaacaacagtgacaatagagtctcaggatagcagagtctgaaaataccttggtctcccccattatgtgagcccttacttgagagcttcatgaagacacttgtaacatattcaacgtcctgtactccagttttgactacgagatcagattttggaggtgtaagtaaacttggctgaggtaacagtaatctgcccatttagttcagtaaacagactgtagagtgtctgactatactgggggaagaggagccaatgacagggtagggagatgacagtggtgcatgatgggagaatcatgaaagtctgggaagcatatggaccagtgggaaggataggattagcactgcacctctacatccatcaagagagacagagcgcacaatggagcaggaaggataaaaaataaagaaagacagagagaaacaaatttgctgggagagggaaagacattcagacccacagaaaggaggcagcacacagagaaagatgcacagatcaacccacatctgcatgggttgtgagactgagcatagtgagagcagtggtggagcaatagaagattgctgtgacaccaggctgcttactgtctttctttgtctcattcacaggagaggacatgatgtgcgcccatcctcccttgcttccagattgttttagtgggccctgatggtcatttttctaaacagaggccctgctttgtaatatgtggccaaggagataatttatctcacagaagcaccgggaagacttagccttaaagagcctacagtgtccttttggactctttcacttcgggacatttaataatggaccaaattcaacagaacaccaggaaggtcaagacgctctccaaagggcaggaagtacagcacttccgaagagtttagttggccctttgctggttgggctgagttttttatttttaagtgtttgtttttcagtgcaataatttttgtgtgtgtgtgattcttatcagaaagttgaattgttttctgcctacaccgttcatcagccccataacccaggaaggaacaggcattgttagcatcagattatacctcattattaaaaggaggcatggccacacatgaagaaatggtcattctacttcaaagaaattgagccagcactatctgtactccaacattaccggatctggattggggaggttggtcagggaagagaggggttctacccacagatcaactgtgtaatcttttactattcaagctataattcagcttcaaagtagagtagaaaaaaaattgtcttaactgttctagttcttgatggttttcttccttattaacagttggtgtttcttccttggcccttttggactaatgttactgtccaagttctttctcaagaaaccacatctggttcagaagagtgtcaagttggactctttgaactctgttgctgtctgagcaatcgtggtgcctagactttgcattccttgttctgttgacctgcatacatgtgagagctatttctttaagaactatataggctgtgaaaacgcactttctttcccccaaagagctgggaatttatgaagttatggcaatgaactgcagcatgctgggacaattatttgactacttttttttgtaatattgtcaaatgtctctatggattctgacagagatttctttttgttttgttattcttttggttgtcagtttcattttaacgagtgtaactagtaacattttattctttggattttgtataattacagtacatgattgtgtattgtgacatgaatgctgtcaaaatgacattgatggcattgtgaagcctgttactttgtgtcacttcctgataaataagaggtgatgacatggatatacaacagaaaacactttgagttgaaagtaaacacaagctggctgcttccctgtggcaactgtgg

SEQ ID NO: 294 - DNA, 25124 bp, Homo sapiens
ggcacatccacacatgagggaaaaacactgccaggacatctcagggcactctcaggaaatgaggaagctgctggagaagtttctagccttgggggaggtcaggacgcagagccatctcctggagcaaagttccctcctcctctctccctcctcctctctccctcctgcagcccttccttccgacccctggccctttctctccaaccttcccctcccctcctccatttccctcctctttctactttcagagaacacagggttcctgcaggaaatggggcagtttcaccttcctgaggaggggcctgggaggggcagcaggtggccgggtagggccagcccagctgtgagcctggcgtgggagctgcctaggccgggccctgccagggagcaagtctgcatcgcagaggccagggtgagtgggctggggagtcggtgcgccagggtactggggtgcccacctggggtggtgcaggcccggggaccccagggcaccactgtgggtggaagctgggaccaggcgtgcggggcaggggacgcggcggcttcctgggattctaggaggctgaggccaggtgtgtgcggcaggggacggggcggcttcctgggattctaggaggctgggaccaggtgtgtggggcaggggacgaggcagcttcctgggattctaggaggctggcaccaggtgtgtggggcaggggacgcggctgcttcctgggattctaggaaactggggccaggtgtgtggggcaggggacgcggctgcttcctgggattctaggaaactggggccaggtgtgtggggcaggggacgcggcggcttcctgggactcaaggaggtgggagagctgctctcagacccgccgctgtcctcccactggccctccccgtggtccctaggatgaggtctggacccgccaggccctccagaggccccacaaccccgcttgtccactgtgccggctgttccttccttgtggcgcccagtgcggtcctaggcacccttgggactcagctcacgtaccccttcctccaggaagagttctcagaggctgtgtgaggagcgccgagtccccggacttactctctgttctggaattctctgcgcagtcatctgccttcccgcccagctaagagcagggcctgttgtccggccccacaatttccttccaggtggaaaggatttgctgaatgaaaatcaaagctgtggccgggcgcggtggctcacgcctgtaatccccacactgtgggaggccgaggtgggcagatcatgaggtcaggagatcgagaccatcctggctaacacggtgaaaccccgtctctaataaaaaatacaaaaaattagccgggcgtggtggcgggcgcctgtagtcccagctactcgggaggctgaagcaggagaatggcgtgaacccgggaggcggaggttgcggtgagctgagatcgtgccactgcactccagcctgagtgacagagcgagactccgtatccaaaaaaataaaagaaaaatcttctccccgggtagggtgcggggagcttcagggttatcacaggacatgctagagagaaagccttgggcacaggcggaagttggagtctggagctgcggctgggctagcgaagggcagaacctacttcggccaatggctcttacacagccaagctattttcatggtgagggtctagtagcctccacatctcttggcgaattcttgctgattggcgtctgaccccatggagaagctcagtgggtgtcatgggtggaagggggcatctagggcctccaaacgtggaagtgtctctaaaatacctcccgctgggcctcagtctccttgtcgacaaaaggtcagctttgacaaatctccagtcggaggccaggagcagacggggagggtccctcagtccctgcttgcagcttcagggggacgtaggctgcggtggacggacactgagccccaaagcggcctctcagagccgcccctgaggggtggcctcacaggtcgggctgaggctcccagctcccactgggtacagagcgggcaggcgggcctggcagggcagtggtgctggtctacacgcagctctggagtctctggacctgtgtcctgtgcgtacatcctggctccatctcccatgagccagggggctggacctgtcttctctacctcagtttccaagagtaggagacaggggtaacagcagccttgctctcaggggtgagggcgtgggttaaagggcaggacacccatggaagcagtggtggctccgagcacctgctcagccttcccaggtcttcagagcccacaggcagagcccaccctgagggaggagcagctggttcttgggtgaagtgagcccccaggaccccgccttgcaggaccccgcgaggccccggtgaactggagccgggaaccggccccacggaggcacgttgggatttggccaccagagggcaggagctgcagcagccaggcaggcggtcaacacgggggccccggggtcctggccggctggtggggtgtgaattggagaggagtgggctgtgtggagggagaccaagcaccaaggcccgccctggcctctgagtgtccacccctttcacaggcccatttcacagatactgaggcccaaaggcgcagggctcaggcgtcccctacgtgtcgtgtccccaggcaggagaattacttgaacctgggaggcagaggtttcagtgagctgagatcacaccactgcactccagcctgggtgacagagcaagacttcatctcaaaaaaaaaacacaaaaagtgaatttaaaatgctccctgaactccagctggggtgcgcagcaggaggctgggtccgtggggcttcgggggctgggctgggggttcaggtgggtgggggagtcagtgctgtggggatagggctcagagcccagaaacagacaagcccacacaggtagccagtgtcgacgaaacaggagaggctgggacctgtgccctggaaggacacagccagcgggtcctgggtcacccactccggggctgaccgggcacagtttcacagagcagtatggcccagccagctgtgagaggatcggacagacgggcggaaaggaggggagacagcgggtgtgctcggggctgtgccgggaggggtccttggatggaggagggggtcgccaggaggcatctgcatccccggggtggtgaagacccagcgtgtatggccgacctcgaggacagggcgattgctccaccagaatgttcccagatggcacagatgcttctggttctggcactgggacctgcagcaggattcccgggtggcttaaagaggttccttgaagtttgtgatcaggaattcaaagtagcgcagattgggacggctgggccttctcccctcagcacactccgcgaagggcagtgcaaacgcacgctggcaggaagtggctgggaagcaggcagagagcgaccaggaagcggccaggaagcaggcaggaagtgggcaggaagcaggcagaaagcggccaggaagtggccaggaagcggacaggaagtggccaggaagcaggcaggaagtgggcaggaagcggccgggaagcaggcagagagcggccaggaagcgggtaggaagcgggcaggttttaccgagcggcgtgacggctccagaggggatgatggagtctggcagagaatggggcgggaggctggaggtcctgggcaggccctggagcagaaggggaagggaggggtggggtgatgggactgcagtgaaggtctggccccacccgagcaaggtgagggtagcacaggtcattacatgtcagggaattgcttggccagggttggggacaattctctcttattagaattgccaggaatcaagacagggtggagctagaacaagggagagggagtggcagagagatggggtgcttggggctctcatgtgatgccctgaggacactgcatgaagactcacggctgagctgggtggaggtgggagaggtaggcaggcaccaaggcccagggccctgagaggtgaggggaaaagcgctcctgcctcacgaggccacaggagctccctcagcacggtgcctgcatggaagaattgctcagctaacatgagctctgaggcttgcgcacatgttacagagaatgaggtggaagcatccacgccaggaggtctccaggccatctggtcaacagaaagccaacaacatgcaaaggacaggagcccacacctgtgccggtctgtgccagaaatgctggaaggcggccgggcgcggcggctcacacctgtaatcccagcactttgggaggccgggcgcggcggctcacacctgtaatcccagcactttgggaggccgggcgcggcggctcacacctgtaatcccagcactttgggaggttgggcacggtggctcacacctgtaatcccagcactttgggaggccgggcgcagtggctcacacctgtaatcccagcgctgtgggaggccaagacgggcagatcatttgaggtcaggagtttgagactagcctggccaacatggtgaaaccccatctctactaaaaatacaaaaattagctgtgtgtggtggcatgcacctgtaatcccagctactcgggaggctgaggcacaagaatcacttgaacctgggagacggaggttgcagtgagctgagattgtgcccctgcactccatcctgggcgacagagcgagactcagtctcaaaaaatataaaaaaataaaaataaaaaatcatcattctaagtcaagaaaaattaaaattttaaattattagcatgtatttaccatttatcttcatattgtgtaatacttggcttaaatgcaaatagaataggatttaactcatacagaatcaacaaaattgtacaattcacatttttattttaattaatttattagtttgtttatccatcttgacaaggtcttgctctgtcacccgggctggagtgcagtggtaggatcacggctcactgtagcttaaacctcctggactcaagccatcttcctgcctcggtctgctatgtagccaagaccacaagtgtgtgccaccacgcttggctaatttttatattttttgtagagatgggggtctccctatgtttcccaggctggtctcaaactcctggcctcaagcgatcctcccgccttggccacccaaagtgctgggatcacaggcataaaccaccaggtctggcctacattatttatttatgcatttagttttgagacagggtctcactatgttgcccaggtgggagtgcagcctcaagctccgaggctcaacaaccttcccacctcagcttcccaagtaactgtgactgcaggcacacaccagcctggctagtttctttatgtctgtagagacgaggtctccttgtgttgccccggctggtctcagactcctgagcttaagtgattgctgcactgttccccgggcaaagttgcacaattcgcattttgtaacttatagattaatatttattttattttcaccagaacggtaggaaccctgcacaaaactggttttattttgctctttacgtacgcacatcccaccagcaccctctacctttggcttccggagggttgccctccctgctccctccctgcagctccctgcccccctgctcccctccctgcagcccccctgcccccccgctcccctccctgcagccccctgccccccccgctcccctccctgcagctccctgcccccctgctcccctccctgcagccccctgccccccctgctcccctccctgcagctccctgcccccctgctcccctccctgcagctccctgccccccctgctcccctccctgcagccccctgcccccccgctcccctccctgcagctccctgcccccccgctcccctccctgcagcccccctgccctccctgctccctccctgcagccccctgcccccccactcccctccctgcagctccctgcccccccgctcccctccctgcagccccctgcccccccgctcccctccctgcagctccctgcccccccgctcccctccctgcagccccctgccccccctgctcccctccctgcagccccctgccccccctgctcccctccctgcagccccctgcccccctgctcccctccctgcagccccctgcccccctgctcccctccctgcagccccctgcccccctgctcccctccctgcagctccctgcccccctgctcccctctctgcagcccgctttccccctgctccccccgctcccctccctgcagccccctggtccccctgctccccccgctcccctccctgcagccccctgctccctctgctcccctccctgtagctccctgcagccccctgctcccctccctgcaccccttttgccccctgctcccctccctgcagccccctgcactcccttcaccccctccctgcagcctgctgtgccccctgctcccctccctgcagccccctgcaccccctccctgcagcgccctgtgccccccactcccctctctgcagccccctgcgtcccctcccctctctgcagcccccactgttcctcccactgctgcccatcattggctgcttgaaaatgtcagactccaagggcccctgtgactagcccagcagcagccctaggtctccaccctgccttgggtggggtccgggataggcctggcctccccccgcctgcttgaacccactgagtatgcccccctcccgccgcaacctcagaattccaaagccagcctggtctccagctcagtgcggtccacacgcagaccctccttggatttcgaaagcccgtgtggctttgccagaggacattccaatcctcgattgtggctggggatggagggagatcaacccatcgcacttacagataaagaaactgaggacggagtttgtcccaactccggggccagggtcagtgtcctccgagggagtcagggaggtggctggggtctgccagtgggggggacacacgacctgggacccccaggccacttgagactctctgggctcgttgggctgggcccaagctcccaggccccctcctctccatttctcaacctgctgccacctaaggcagataccctacactactgcctggggggcctcaaagggtgatcacccagcacaagctctcctgcctggcctgggaccgagagtcccagaagcccctgggctggccggatgctcaaggcctcactgagggcatgcgtatcttcggaaacaagaaccagctgacatgtgtgaggctttagcccggctctccctggggtactgtgcgagccctcaaggaggtggctgttctgtagctggagagctccgtgggtggcaggactgaacttgaacaccagaaacaacccccaagccttgtgacctgggaggcaggaggcgggtctgtctccctgggacttgggtggctgagccgaggtactcgggaccctgtcccgcgcatggtgagtctcggggagcggggagccgggagccaggggttgtggttttggggagcgtgcagccaggttgaggcccagggctgtaatgagggcggaaagcccctctcctctctgactgcctgtgatccaccgtcagcgagggagaacctcagagagtaggcatctacagcatagcatggagcaccatcacaggcagtgaagggcgagagtctcagaggatggaaccgggtggggggcctcagctcgtgccatcacgggcagtgaagggtgaggctctcagaggatggaaccggcgggggcctcagctccaggcaggggtgagagggtggcttctggggtgactgtgtctggaggatggggtagcaagggtggggaggccaggctgaggggccctgacctcatgggagctgggagcctgttgggaagtccctgagaagtgcttcactgggattcactgggaggaagagctcgcgccctggtgcagatgtgggctgtgggggatcagagtggtgggggcaaccgtggggggcctgggcagggtgaggagggatgtggggaagccaccagcctcagggtgggctggacgctgggagggaggcgttgggggcagaagtggggtgccggccttacggctgggcctgcagattgaggggcctgtggactcccccagtgcagacatcagcctggtcaggagccagaagagagagtccggggctgctgagcctgctgtgagccaccggggcctcccacggagagagacagggccgggctccccgtggagctgcaggctcccgatgttcccttctcaaggcttatttgggggcctctgtgccaggccccatgggtggtcagatgggccccacgctgagtgtgggctcccgtccctcgcacatgcaaggaagggctcaggtgagcaggtgcgcgtgtgcggctcacctgtgcatgcacgtgtgtctgtgtgcacgtggaggtatctgagtgtgcgtttactcatcccgtgggaaagtctgcacatgtctgttctaggtacgcggacgtatctgaccgtgtgggcttgcgatgcgcccaggtgttctcgtctgcgatgatctgtgtgtggggggcgtgggtaggtccgcattgcctgtggctgcctgtgcagaagtggtatcatccgaaatggccacggtggcgtctgcatgttggctgtggatggggcttctgtgtggttctgggagacagagctgggtggaaacacagacatcactgtcgaggctgtcacctgcgtctcgacagagccgagtcagcaccaccctgtgaggagagcgtgtggggtggggcctcggtgcacccatctctggagatggacccaggactctcatgcaggagcccacactcttcacagagcactgctcccaccccgaggggtctcctagcaacgcttctctaaacattaactttcggggccaggactactaaccccagctctctccctaagcctcactatggccaggggaggggagaggcaggagggcctgggcaggacaaaggaccctggtcagtcggggacatgaaagacgcacaaccagaaccggtggaagaaacagaattaaacacaccctgaacctttcccaccgcaactctgccggctgcaccctctgggtcaagatgtgaggtaaggcacaagcatttcctcctgctcctgtccacgaaggtgagaggaaaggaattagaaaagaataacgcactcgggccgggcgcagtggctcacgcctgtaatcccagcactttgggaggccgaggcgggtggatcatgaggtcaggggttcaagaccatcctggccaacatggtgaaaccctgtctctactaaaaatacaaaaattagtcgggcgtggtggcgggcacctgtagtcccagctacttgggaggctgaggcaggagaatcgcttgaacccaggaggcggaggttgcagtgagccgagatcgcgccattgcactccagcctgggtgacacagtgagactctgtctcaaaaaaaaaaaaaacacactcgtcagacaatagaaagtctccgctgcaggcaaagattccgacccatttctgggaaggaggaagtgaatggaagagtgtgtctgtgaggaggactagggggcctcactgggaacgttccagggtgttccagcgagagaccagggagccagagaggagctcagctcagacgttgcaggcacgatgggccgggagtgaggaagacgctgaggtcggggtttgttcccaattggaagaactggccccaggaccacccagacagacacaccaccctaacccccacacagccagaggaaggtcaggaggcccttccctaaacatgtttttgagaatcgaggtagctatttttaaaaatgctgctgggcgtggtggcagttgctttaaaaggagctgctgtggacccagctacttgggaggctgaggtgggaggatcgcttgagcctgggagttggagtccagcctgggcagcatagcaaaaccccatctcgtaaaaaaaaaaaaatgctcatgccttccggcttcaagggccctggtaaccgggcatctccggagctcgccccacacaaagcctggggtcgagagcccgctcacacatacggcacggcccaccttgctgttgctttatttttaaatatgaaatttgtagtgacaaagattgcccgctgccaagggaagtctgcaaacccaacagaaggtccagatgaacaatgggagacgcgtctgcattccgtttggtaaacctcagaagagaacagagtgtagctgagtccaagcagatctgcttccctgacgggagcggggcggaaaagaacacagcaaaccttggaaaccgccctccggagaccagacgcacaacccccaagaaaacacgaaagaaccgtgctgggagacaaaacagaggaaatggagtgcacaggataagcaggaagaaagccaggacaggaggcagaaaggaagctcagacagtgcaacccctgcctgaaaccctggccagacggagctcagaaaggaggggaagaagagggatacgggcgactggaaattccctggaccggaggcagaggaaacgctccagggagtgaaaaagcctcacactaaagcacgtggctgagaagtcgtggcgctccgaggaaagaggcagctccaggcctggagggaacagcggttgcccacacacagccgggcccatccaccacacatgcacagacggactgtggtgcggtcacctcctgagggacaaaggtttcccgcccaaagtgcacatccagagaaactactgatgagggcagaataaagacagacaggaggactggggagtgaattcctgccgacccgctgctagggaatggttgcagggccaactctaatggaatagggtttagtctgctttgcattgctccaaagaaatccccgaggctgggtcatctatagagaaaaggggtgggtttggctcatggttgtggaggctgaatgggaagcgtggcaccagcgtctgcctttggtgaggaccccagggaacctctcatcacggcagaaggggagggagcaggtgtcactggaaggatggcctggaccgtaatagtccatgtcctcggcgtttgaacaaagaagtggacaaaacgtgcaaagtaacgaacaaaacacggaaagaaagcagcgaaagcagggatttattaaagcgagaaaggtcgggagtggggtgagaggggcgctgttacatagttttctggggtttgttttttttttgttttgagagggagtctcacaccgtcgcccgggctggagtgcagtggcgccatctcggctcactgcaacctctgcctcccaggttcaagcgattctccagcctcagcctccggagtagctgggatgacaggcgcccgcaaccacgcccggctaatttttgtgtttttagttgagacggggtttttctttgttggccaggctggtcttgaactcccggcctcaggtgatacacccgccgcactctcccaaagtgctgggatgacaggtgtgagccaccccctcggccagttttctgggtcttaagggcacctttcatggttcctatacctcttatctggatgaaagatttggtccgtggctaatcaaaggctgaggtaaactggtgtctgcagatgaaagggtggcccgcagccagtccacagcactttcctttccatctgggacatggtggtgggggctgtacgagagcagcctttgatcctttgctactgggcgtggggctcttcctcagggtgtagtttttggaagttggtgttaattggccctgggttccctgccccagaccttgaagtttttcctggattcagcgtgctttggcctcggactctctccccctgaccttggtgttttctcttttaggaagtcagcacaaattagcgtcccattccctgccccaggcctcgctgtttttccttgattcagcacgaattggcctaagttccctgcccccagaccctattctcctgctcccagggcatcacgtgcagagagggaggcagagagtgaggggggaggtaccaggctcgttttaaccgtcagttctcttcccaacgaactcattacctccagaactgcaccaagccattgatgaggggcccgtccccatgacacaaaacctcccaactgggatccagtttccacgtgagatctggacaaacattcaaactctatcaggactataaaccaaacaaaggtggaagaccttcagtgcaggcattaagtgagcactgacattccaggctgggagtagcaggttggacgaggggaggctctgggggcagggagggaggttgcagagtccagagcttggaagatggaagataagggcacccagtgtagggcaggagaagaaaggcaactggaaactctgggacaaactataaaaccccacggaaaagacaggtgtaaggtgactaccttgatccgagggtgatctgagtggctggtacctttgtgctcacagcaggactgtcgtaaagtaggtacatccatgacttctacttgacagacgaagagactgaggccgagaaattgaaccagctcacccacgctgcccttgaacagtggtcgtgagaggggaacccacagcctaccaggacacggggccctgcccaacccccaggacgccctcgtgttgaattaagtccgtggctttgagcctcagaaacggtgcaaaatgcagtccacgcgtggctttcggccccggtctggtgctcggaagacatgtgcctccctctacctgccccccgtcctcccgccactgtgaggccctgagaggccctgagattcttgcgatgtgtgaataagggtgccgcattttcatgttgcactgggcactgaatggtggagctgagtgatgcggtttggttctgtgtccccacccaaatctcatctcagattataatccccacctgtcaagggagagacccgctggaggtgagtgcatcgtggggccattcaccccatgttctcgtggtagcgagaaagttctcacaagatctgtttgttgttgtttttgttggtggtggtggtttttaagacggagtttcactcttgttgcccaagctggctggagtgcagtggcacaatcttggctccccgcaacctccacctcccgggttcaagcaattctcctgcctcagcctcccgagtagctgggattacaggtatgagccaccgcgcctggctaattttgtattattagtagagatggggtttctccatgttggtcaggctggtctcgaactccggacctcaggtgatccacccgcctcggcctcccaaagtgcttggatcacgcggtggcgtgcgccaccgcacccagcctaagatctggtttttaaaagtgtttggcagtccccccctcaaactctctcccccgctgccatttaagacatgccttgcctccctttgccttcggccatgattgtaattttcctgaggcctccccagccatgtggaactgtgagtcaatgaaggcttttttcctttaaaaattacccagtcttggccaggcgcggtggctcatgcctgtaatcccaacagcttgggaggccgaggcgggtggatcacttggggtcaggagtttgagaccaccctggccaacatggtgaaactgtctgtagtaaaaataaaaaattagtcagacgtggggccaggtatggtggctcacacctgtaatcccaacactttgggaggccgaggcgggcggatcacgaggtcaggagatcgagaccatcctggctaaaacggtgaaaacttgtctctactaaaaaaaaagaaaaaaaagaaaaaaattagccgggcgtggtggcgggcgcctgtagtcccagcttctctggagactgaggcaggagaatggcatgaacccgggaggcagagcttgcagtgagctgaggttgcgccactgcactccagcctgggcaatagagtgagactccgtctcaaaaaaaaaaaaaaaaagtcagatgtgggatcaggcatggtggctcacacctgtaatcccagcactgtgggaggccgaggagggcacattattttaggtcaggagttcaagaccagcctgaccaacatgatgaaaccctgtctctactaaaaatacaaaaaaaattagctgggtgtggtgtgcgcctgtaatcccagctactccggaggccgaggcatgagaatcagttgaggcagaggttgccgtgagccgagattgtgccaccgcactccagcctgggtgacctactgagactctgtctcagagagagagagaggaaggaggggaggggagaagagggaaaggaagggcaggggaacccagtcttggatatttcttctttttttttttttttttttttttttttgaaacggagtcttgctctgccacccaggctggagtacagtgttgcaatctcggctcactgcaacctccgcctccctggttcaagtgattctcctccaaaagcctccaagtagctgggattacgggcaagggccaccatgcccagtaaatttttgtatttttagtagagaaggggtttcaccatgttggtcaggctggtctcaaactcctaacctcgtgatcctcctgccttggcctcccaaagggtatttttgtttgtttttgagacggagtctcgctctttcgcccaggcgggagtgcagtggtgcaatctcggctcactgcaagctctgcctcccgggttcatgccattctcctgcctcagcctcccaagtagctgggactccaggcacccgccaccatgcccggctaattttttttatttttggtagagacggggtttcaccatgttagccaggatggtctcgatctcctgacctggtgatccacccgcctcggcctcccacagtgctgggattacaggcgtgagccaccacacccggccacaaaaggtatttctttctttctttcttttctttcttttttttttttttttgtgagatagagatttactcttgtcgcccaggctggagtgcaatggcgcgatcacagctcatggcatcctccacctcccggattcaagcgattctcctgcctcagcctcccgagtagctgggattacaggcatgcaccaccatgcctggctaatttttgtatttttagtagagacggggtttcaccatgttgcccaggctgatctcgaactcctgacctcaggtgatccgcccgcctcagcctcccacagtgctgggattacaggtgtgagccaccttgcccagcccccaaagggtatttctttatagcagtgtgaaaatggacaaatacagtggcctcaagttctctccttagtggcacctgagggagtgtggtgctcttggaaatgctctcctgtcactcagtttctgcctctgaagcgacaagcagaacatggatgttctcagagtccagggctgtgtagatagtattggagctgaaggcaaaaggaaaaatcagaatattgggcctgtctttattttaaaggtttgtgggggagggggggcggtttgtgttttgtttgtttgtttttctgagatggagtcttgatctgttgcccaggctgaagtgcagtggcatgatcttggctcacagcaacctccgcctcccgggttcaagtgattctcctgcctcagcctcctgagtagctgggactacaggtgcgcaccaccatgcccagctaatttttgtctttttaatacagagagggtttcaccatattggccaggcttgtcttgaactcctgacctcaagtgatccatccgcttcggcctcccaaagtgctgggattataggcgtgaatgactgtgcccagctattttaaagttttatactttgttcattatggattttttttacatgaattctgatttttttaaaatattgaatgaaaatacgatttatcatgacctgggcatggtggctcatgcctgtaatccccgcagtttgagaggccaaagcaggcaggtttgcttgaggccaggagttcgagaccagcctgggaaacatggggaagaccccatctctacaaaaaatacaaaaattagccagacgtggtggtgcacgcctgtggtcccagctactcaggaggctcaggcaggagggttgcttgggcccaggaggtgcaggttgcagtgagccgagagggagccactgtcctccagctggggcgatcctccttccctgccgggctccccccacccccccccgaagcctctgaccagttttccctcctgctcctcccagcaggcctggtttagccccagtgctcagcccactgtcccccagaaccccagacaccacccagccctgggattaagattcttccgtcagggcaccacctgggaactgtgtgcccaggagccctcgggcgacttgaatgtgctctgctgagtcctagagaggccccggttctaaggacgtgtctagctgcttggcctgaagctctgtagctggagtgtgggtccctgtgacgctggagggctgcaggccgggggtgcggacccctcagcaacagggcaggcgccaggggcacacctggctgtgcagcagcttcctggaacgccctaatgtttatcccccatggcaagtcacgtaagatgatttttacgtggaaaggggtgctttatgagaatgcactatttgaatgactgttgtcttgcttgcagatctaggcccccgggtcctgagggaggtggtagtaataacagtagcacagctagagccaacagccactcaccactcatctgggcctgctctcagcctgctgtcctttcatctgggctctagctccacccctgggtctgggatcccagcttcttactatgcctccgcctagcccagacagcaacgcccagtcattgagtgtccggccttccatcctacccaccctggtggggaatgtgctggttacttattgaacatgggaagctataaacaggagagcagccacctgtcatcacttccacccacacctctggtgcctctcctggcaggcagagtggctcctcacagcctgaagctcatccttctgcacgggccagccaggccagcacagaggcaccagggcagcagtgcacacaggtccccggggaccccaccatgtggagcggatggtggctgtggccccttgtggccgtctgcactgcagacttctttcgggacgaggcagagaggatcatgagggactcccctgtcattgatgggtgagtgctcacctgagccaggtgcttagggaaccaggactgggaactggggctgggagagcggggctgggggagccggggctgggggagcggggctgggggagccagggctgggggtgccggggctgggggtgccggggctgggggagccggggttgggggtgccggggctgggggtgccggggctgggggagccggggctgggggtgccggggctgggggtgccggggctgggggagtttggcctggggagttggggctgggggagctgggggtgagactcgtgtgtgcttggcttggggctcagtttctctgggggtgagactcgtgtgcccttgggttggggctcagtttcagcttctgcgacggtgccgggcccttgccctttcctggcccctgctgctttgtggggtctctcagggcccccaaagacttcagcggatgaaggtctgcagggactgggcaggaaggaggcaaggccacactccctggtcccgaagctcagagtgaggtctgagcctgcggacgtggaggccctgcgccccaatctcaccctgtgcctcagcttctcccaaaagcagcaggtgcgggtggcaccctacaggccctctcagccggcatctttttggctctcttcccactccccccggcctgccttctcccggggggaggcccatgccacttgggcccttgcctgtgctgcgctgtgtgcccacccggcccccacccccgacctcgctggggcacctgggtcacctgcttctgtcctgacctcctcagggcggagatccccactgcccgggaatccgaccctcttccccgccccttcctggcccagtgccccgacactgggtcaccatggaggcctcctgcttccaggcaccagactcagatcagggtccacactggctccgcgttggggtgggagggtcactgagagtccgccctgtgtctggcatggtgtctccacctggaaaatgcctctgggctttgttggggaaaaactgtgaaaaaagcagggaaacccgatgtcttgtcgcataagaacttcagggaacagtccaggctgggcagttcacgcctgtaatcccagcactttgggaggccgaggcgggcggatcacctgaggtcaggagctcaagaccagcctggccaacatggcgaaaccctgtctctactaaaaatacaaaaaattagccaggcatggtggcgcatgcctgtagtcccagatactcaggaggctgaggcaggagaatcacttgaactcgggaggcggaggctagagtgacccaatatcgggccactgtacttcagcctgggcaacagagtgagactccatctcaaattaaaaaaacttaagagagcagaggcagctgcagaaagggagcagagggtggtccctgcatcctcatggtttaaaatggccatgccagcttcagccctcacatctgtatgctggccagcagggaggagggagacataaagaagggaaaaaggacaagcagcaggtgactgtcagggtcaggtttttgttttgttttgttttgagacagagtctcactctgtcacctgtcacccaggctggagtgcagtggcgtgatctcagctcgctgcaacctctgcctcctggatttaagcaattctcctgcctcagcctcctgagtagctgggattacaggcgcccgccaccaagcccggctaatttttttggtatttttagtagagacagggtttcaccatgttggccaggctggtctcgaactcctgacctcaggtgatccgcccgcctcggcctcccacagtgctgggattccaggcgtgagccaccgcgcccggccgggggtcacagttgttagaagctgttacgggacccaccttcatcccttggccaccgccagcgacacaggggcaggaagtatcttcaacccaaatggctgtgtgcccgctaaaaacggggggttttaaagtcacaaaggaaaaggaggagaatggatcccgggggcagccagcagtctccccacgaacagctgcctgagtgtgtgcttgccgcttttccagcactttccagcactccttggagcaggacgccggcttccatatcccagctaagggcattgccccagctgcacagataaggagggtgggtctgattagcagaactgccatttgccctggccatgaggcaggcagggcctccctcccactgagaaaccagaggccccaccttcccatcgttttctccagcaagagtggagagggctggcggggcacagtggctcacaggtgtggtcccagcactttgggagaccgaggtgggaggactgcttgaacccagaaggttgggggctgcagtgagctgtgattgcacccctgccctccagcctgggcaacagagtgagaccctgtctcaaaaagaaaaaagaaaggaggggctgcaggaggaggagggaggggagagcagagagctgccccattgcagcctgtccctccaagggcggctcctggggtcctaggaatccctacccatcccaggctaatgtctgagatgggccgcctgcgtcctcaggccaaggagtaaagtctcctgggagccctgcccagccccacccaggacagtgcccagtgtagggttgcacctagcgatgaggctgctgcccgggcagggtccctggctggagctcatggttccctcagcaagtgcgtcctgaccacccactctgctccgagggctggggagaggcccgtgccagcccaggctgtcatgtggactcgctgtggccagggacaacctcgctgacgcaggagctttgggagagactcacaccagcatcaggcgtgcgcccgcccatctgcccaggggtggggccggaaagcgtgccaggctgggcttgggggcactagcccaggggaggtcaggaacgactgggacccaggaagggcagagccctccccttctttcccctgaggagctccatgggtgcattcgccttggaaaagctcattgcgggcacatagatttgagctgggtcacagaaagcagagcccgcagctggaaatgattaacagttactcatctgcctctcccagctgccctccaaggaaagcaccaagacaccctcatgttacagatggggaaactgagacacagagggagctgtcctcaaggagagcaccaaaacaccctcatgttacagatggggaaactgagacacagagggagctgtcctccaaggaaggcaccaagacaccctcatgttacagatggggaaactgaggcacagggatgggtctggaaactgcaagtggaggggcccctgtggcctcatcccagcgcacaccctcacaaggcagtccccccgagacaggggcacagcccacattacaggaaggagactgaggccccagacccagtgacggggaaggggaaccctgggcattccccagggtcgggggtcaggcctcagccccttcccatcctcctcacagcctggttgaaacacagatgagatcgtagcctagagcctgccctgggccccttagagctgcatttctatttttcttttctcttctcttcttcttttttttttttttttggagggagtctcgctctgtcgcccaggctggagtgcagtggtgcgatctcggctcactgcaagctctgcctcctgggttcctgccattgtcctgcctcagcctcttgagtagctgggactacaggcacccgccaccactcccggctaatttttgtatttttagtagagacggggtttcaccatgttagccaggatgatctcgatctcctgaccttgtgatctgcccacctcggcctcccaaagtgctgggattacaggcatgagccaccctgcctggcctgagaattgcattcctaacgacagtggattccctttgctcctggtctctgccaggccctgttgggcagctggattcggaccctctgggatcctcactcagccaccagctctgacagccccagctcccccttcctctgcgttccccttccttctcctttccccttccttctcctttcccttccttctcctttccccttccttctcctttcccttccttctcctttccccttccttctcctttcccttccttccctttcccttccttccctttccccttccttccctttccccttccttctcctttcccttccttccctttcccttccttccctttcccttccttctcctttccccttccttctcctttcccttccttctcctttcccttccttctcctttcccttccttctcctttccccttccttccctttccccttccttctcctttcccttccttctcctttcccttccttctcctttcccttccttccctttcccttccttctcctttcccttccttccctttccccttccttccctttcccttccttctcctttcccttccttctcctttcccttccttctcctttcccttccttctcctttcccttccttctcctttcccttccttctcctttccccttccttccctttcccttccttctcctttcccttccttctcctttcccttccttctcctttcccttccttctcctttcccttccttctcctttcccttccttctcctttcccttccttctcctttccccttccttccctttcccttccttctcctttccccttccttctcctttccccttccttctcctttccccttccttctcatttttcctcacgagagctcctaccctcaccaccaccagctcctgggaaaaccttggagaacttcagtcctttggaagtttagaaggatctgattggagtttgggtgcagggctcttccctggggacagaggcagcagagaggcctgggtagcccccaaagcctgtactcgacaccctgctccccaggaggatgggggtcccaggccccccaaggtcaggccgttccaattacccagccacccaccatattccccaagaggcaatttgatctttaaactgaaaactctcagaaacagtatcacccccaggcccttgcccctcacgtctccaatcctgtccactgaggtcatttggctccttgtgtcccaccctcagacaatgtgtctgccccccagcctcctccacagaaaaaggccctggaagggatgggctacccagctccctgagctcctggctcggggttccctgccctgggggtgggcacagttgggaaatgcagcctgcacaggtgtgttcaggtggccggtgatatgtcacccccgcggcctagacttcagtcctgcgtctgtcgtgaggagtaggaagtggggagagcagcccagaggccaggagctcggaagcccccaggtcccagtggccgccctgactgcctggcctctccccggcaaactccaggcacaatgacctcccctggcagctgctggatatgttcaacaaccggctgcaggacgagagggccaacctgaccaccttggccggcacacacaccaacatccccaagctgagggccggctttgtgggaggccaggtaccgcctgccctgccttgtgcttgccctgtgtggggtcatcccgtctcctacctcaggcctggctacagtgggaccatccctgtggtgttcctccagggtccctcggtgcccaggccgagggagggcttcccagcgggtgggaaaccagactcccacaggcatgcggggggtgggctgagacctggctgcatcagctcctggcaccccctgcggcccacagttctggtccgtgtacacgccctgcgacacccagaacaaagacgccgtgcggaggacgctggagcagatggacgtggtccaccgcatgtgccggatgtacccggagaccttcctgtatgtcaccagcagtgcaggtggggtcctgacctgggtcctccaggtcctgcgtcttctcacccagccctcatcctgagcagcaggtgccggtcaggacacctcaccctccagataccaggtgcccactcccctgcaccctgactctccccgcaggcattcggcaggccttccgggaagggaaggtggccagcctgatcggcgtggagggcggccactccattgacagcagtttgggcgtcctgcgggcactctatcagctgggcatgcggtacctgaccctcacccacagctgcaacacgccctggtgcgtgactccccatgggaggcccccgggctgtggtcaggagggagggggcagacactccctgccaccctccagagcccatcccctctgcctgtgagtcccaggccgggcctcgcctgctgggctgatgggaggccgagaccaccgctcacctcttgggcacctgccttttgcttctccagggctgacaactggctggtggacacgggagacagcgagccccagagccaaggcttgtcaccctttgggcaggtgagtggggtgggagcggccagtcacccccgaggagaaggcagaggccctggagggtgaccagaacaatgcatctcctcacgtgggacctcagtgtccttgtctgtaaaatggagctggcagccatccccccagggtgggtgctgagccctgagtggccccggacttccagccacgaaggatgatgactcacatctggtccagcccgtccacctccgcagccccgaccctgggggctgtgagggtggacggagccctgtcttcccagcgtgtggtgaaggagctgaaccgtctgggggtcctcatcgacttggctcacgtgtctgtggccaccatgaaggccaccctgcagctgtccagagccccggtcatcttcagccactcctcggcctacagcgtgtgcgcaagccggcgcaacgtgcctgacgacgtcctgaggctggtggtgagggccgagggggcgacctccaccccgcctccctgggcaggccctcccagctctcagcttcaccctgtcttccttcttgtgcagaaacagacagacagcctggtgatggtgaacttctacaacaattacatttcctgcaccaacaaggccaacctgtcccaagtggccggtaggtggggtgtgagcggccaagggggccgaagggggagggcctcactcgggacccatacctgctgctccctggacagaccatctggatcacatcaaggaggtggcaggagccagagccgtgggttttggtggggactttgatggtgttccaaggtaaggggctgagagctctgtcctgtggatgagccgggaggttcatggcctcgtcagagggatgaggtggctggaggagggacctgtgtcctagtgtgggggcccaggttctcctggcctcaacacagggtccctgaggggctggaggacgtctccaagtatccagacctgatcgctgagctgctcaggaggaactggacggaggcggaggtcaagggcgcactggctgacaacctgctgagggtcttcgaggctgtggaacaggtgaggatggggtggccacctgagtctcccccaccaccaccagcaggcaggctgccccacccgtgtctgtctgtccccaggccagcaacctcacacaggctcccgaggaggagcccatcccgctggaccagctgggtggctcctgcaggacccattacggctactcctctggggcttccagcctccatcgccactgggggctcctgctggcctccctcgctcccctggtcctctgtctgtctctcctgtgaaacctgggagaccagagtcccctttagggttcccggagctccgggaagacccgcccatcccaggactccagatgccaggagccctgctgcccacatgcaaggaccagcatctcctgagaggacgcctgggcttacctggggggcaggatgcctggggacagttcaggacacacacacagtaggcccgcaataaaagcaacaccccttca

SEQ ID NO: 295 - DNA, 58330 bp, Homo sapiens
ctggagaggagattcccagccttcctgcccaacccgaaacttttccaacacacgcaggcgtattcctcgcaggattcggcggtcccgagtcgcagtcagggaggaggctcgggaagcacacgtgccctggcacactggaggaggtacacaggcacaccaggagggacagggcctcttgggaggcggctgagggcgtgaaggcagcaggcggccacacatccgaaagggactccctgcgagcgggatcgagcgcttaaaaccctgccacagcttggaagtgtagcggtgcccagaggctttgcgtaactttgcccactgcgcccccgcgtgcaaaggtgtccccttcacactcacaccctcaccccatctcactccccttgagttgcggcccgagactgcctttgtacttaagcgacagcaaaagatatgtggatttgaaccaaagatggtgggcaagagtgttgtaaattgtgtaaattccactcgcgggaacccccagatacgtagggagagcacccctttctcgccgaaggcatcccctccgtttctctcagcctttgggtttccagcttcttcgctactatggactgaagaagacaaagcacagccaaatcaatgttttgggtgtttttgtttttgtttggtttttttaaatcacggcctctccaaatgctaaccctcaaaacgatgggtggggttggagaaaggcaagttatgtcagggagcacccctcggaaggcgcgcgcgcggcctggccggttcctcgccgggctctgggcagccgggcggagtggctagattatgtaagtagcagccctccatgtgctcaccaccatctgttaatatcttggtattggaaagttcggtgcctgaggcaaagccagggttggcggcgaagagctcccagcctacacttcactactccagggcagggaatgtacttccctttgattgttttcgcccacttccataaaatcaagtagtagtgtgtcccttcaatcactgacaacctcctcatccccgcgggtgtgtctttgtgggcgaagagtgattttcttcgaggtcaacttattgtaattagccctttcgatgaaattatattttcatgacaattctgcgctccttaaagcaatgtggcagactcttatttgggagtgggttctttatcattttaaaaattactttctttctgccagcacccctggatccaaattcttgtaagggttatatttcaacttctttggagtgattggcttctgtttactttgaaagctgttggttaaacaaacatcactcaggaggcttctaagcagtggggttcccaggagagaaaacgctgcagctgctacttgctactgatcttgtggcatttcacttcccccccattcagaacaaatccaggttgggcttggcgtcacactgagcacaggagatgagagtgagaggccgtcagtcagttttgcctctagaaagcttgcagcaggcaggcctgcaccctggggttggttttcctctcttcccttcttcagggtgctgatagtgatggtggtagtggtggcggtggtggtggtggtagcggtgggtggctgacctggaagtccttaggcacccttttccaaaatccacgtccacttttgcctctcaactgaatctggttgtaattctcagaattggtttgtttaggatctgataacagttgtttgtaaggttttaaattacttatacacactgtcttccctcctgcccccacctaacagctttaagaaagaacaggaggcgtgagcatacaccgagcaaatgtcaaggcgaagtgtatttaacccagaaccagatgcatgggtgataactgcgagtttgtctaagaacacacagatcacccttcagataaataagtaaatgcaacctgcacggatagagtgtgttacaagaccggtcagaacttgcgttaacttctaagttactggggttgtgttggaagtggggcggagggaggagttgtcttaaccctaggcttggcggctggtttcagagatggagccaatatctaggcgactccttgtctccaggcttctcccctatcagaaaacaaagcgggagtcgcccgagatagggggctcgggcctcaagtcttgtccagggcagcccgagacccaggagaatgccgcagctctagcaagagaggttgccaggagcctggcctgtacgcctccccgacagtagaggacaggacacgggacagggctgcgccgaggcagctcacggagctgggctgcgaaccgatctcgctcgcctagcgtggcgcgcgctcctatttcaagtcgccgctcctgcgccctaatgcgggctgcgaaccgccgcggcagagcgtcgcgagccgggagcctctgccgccgaggctgggggtgggagagcttccttgttcggcaagcgggttaccccgacttcgactcaggcctgcttttgcccacggcgtgacacaggacttactggggttctcagggaacttttcccgccgccagttcccgggcgtggtgtgtgcaaaacgtgcattcaagcgctatgtgcaattgacacaaacttgtgggctaaagtgcaagccatttttttcgcgtttgaatctttttctctgtccctgactcctttcttccccctactcccccctcctccttctctgctctccgcccttttaaatgtcaaactgagcagatggttttaaggtgtggaaaggtatatagcccttactcctaccagtttatttgtgggctggcgctaacttatatgtacaaaccaagattcttaaagaaaactagtaggacgaaaaataagaaagaaagtagctttgatccattctcagatcccaagtttccccgctcaatacacccgcttacctcgaagggacccaaccaatagaagcattattccgtcctgtatctaatgggcatgttgattatttctgctcccagcctcaactgtcacatcccggttagaacacctgatacaacagtcaatagttggaggtgtgagtggtgcgtgtgcgctcctctgtgttgcttccgtgatagacgcgtggggggagtgtgtgggggcggcaaaaggggaaagaagaaggctggggatgctcccgcaatctcttttcttatcgccgacacctaacctgaccgacctaattttttttctccttttcactgtttgaaattcgtgccaaaagtttcctgccgggatagactcggacatactaacatcgctattcttattcaaagggagggcttaatatcctctttacggtttggtgaatttgaggctgaaattgtaaattccctaggaaggagtgtgtgtgtgtgtgtgtcgcagaagacattggtagtgtttggccagtgtacttgtaacacacctcataaataccctgttgtcacgacacagcatgattcaacctttgatctgattaaatttgagggacacacgaagactacttgtcctcctcctacttacaaaaatgagtgtctaatagactatgtatgaatgtttctgcttcgcagctcttgcaagtcccagcttttataggatctttaggtcataaacgcggctgctttattaaaagccgtttactgtgcccggtgaaagggacgttctagctgcggctgaggctcgcttgcatttgtaacttgcaaagcccaaggagatctttaagagccacattatctaaagaaattttgctggttatttttcaagcaagaaatgtcaaaccaaagtaaattttctagggctttattttagagcctgcgatttatgcgtttgaaatttcttgcctaataaactttaaagtttgttgcccaggcgtcaaaactgtgtaaatcctgtattgaacagctatctttggtctttctggggcgagtgaattagtgaagggtaatcgccagatgtttgcaacatatatatttttaaaggctgctttacctacaatccaactaatgtcagaggtaaccaagggtaaatattcctcttcctgataatttggactggagataaactgggactcagccaatgttgatcttcgtctaataacagatgcagcggacccgatgtgaaacctctggcacctattattttaataccaaacctacctgtattttattgtccacctcccctttaaaaggaaccaagggtgacacgtatccttgacactacctatgatcgtttaaaaagtggaatgatttgcagatccccccctccctcctcctatgccacccccacccctaaaacccccactttttctcccgtatacttttccgtgccttcctccacccaagtcggaggagcgctcactcgctcggccactcggcgaactcgatcagctgtatctgggaaatgaaaaaagaaaaagaaaaaaaaaaaaaaagacctgcgtcctggaagagctagtgtgagccgggcgccgctcgcgccgtctcccgctttgcatagtgcccgcagatggctcgctccggcccaggcgcggcgatccagtcgtcccgaagctgtggcagggtgggggtgggggtgggggccggggatggaggccggggagggggagcgcagggcccctctcccctcctctcttcccagcccctcacccccaccccttttatatttttttttcctcccaagttctcttgccttgctatccccccttgaatccgaaggcgcctcgcgattgggtgctggggccgggtacgtcagatagactgtgacgtgcagtcttcctgtttccttcagctgtgtcttaaagtaaatcttgttgtggagcggagccctcagctgagggagcgctctgaaataatacaccattgcagccggggaaagcagagcggcgcaaaagagctctcgccgggtccgcctgctccctctccgcttcgctcctcttctcttctttacccttctcctctctcctcctctgctgctctctcctctcctcccgctcttctctctcctcctctcctgctctctcctcttcccttagctcctcttcttttcttctcctcttcttccctctcctcgcctctcccctgctcctcttctctcgtctcccctcccctcccgcctctctctcccctctccctctcccactcgccccgctcgctcgctcgctgtcgcacagactcaccgtcccttgtccaattatcatattcatcacccgcaagatatcaccgtgtgtgcactcgcgtgttttcctctctctgccgggggaaaaaaaagagagagagagagatagagagagagagagagagagagagagagaggctcggtcccactgctccctgcaccgcgtaagtatcttcttcttcccctcgtgagtccctccccttttccagaatcacttgcactgtcttgttcttgaatgagaaaggaagaaaagagcctcccattactcagacccgtgtaaacattattccccccaggagaaaatggtgttattcaaatgaatcataataaaatagcctctaaacagtttctaagcgggagcctccgtggaactcagcgctccgctcctcccagttcctaagagtaagtgatcctcttggcttttatttctttctctttcctgctggtggctgggggtggcggtggcgatgggggggaggctgatgttgctggacttgtcgctgatcttgtcaccttttgtgtactgtttctggggtgtgaggaggcgtttgctccctttccttctttctcctgctctctcttctcaggagagaggaccgcgagagggaccgggtcgcttttttgttcgtggagatccccgctttccgccaaaccccatccttccgatctccccaggctaaaactccggggccggtccccttgtcctttctctttgtcttgtttattatagctgcctttcttcccggctcttccaatttgcttgtcatttgcatacctttcacttctccttttttaaccccagcagaggaccgggaactgggaggaggagagagggaggtgggggggcgctctgttactttcgtctcaaaacgctgtcgaagccgaattgtggaaatccggcttggaggggagcggtgatgggtcccgggaaacgcgcgcggcgcccctcttccgagctcctggacccagggctgggtcaagttgagtagggtaaggcggcaccgggaggctcggggggtcgcgtggcggtgggattgggacaccagcacgaggaggaccggaggatcgcgggccgggtaagagtagggggttcttgggcagcagaaatgggaggcgatgaatctcccagccatcgctggcagactatggtgttgggcagcttcggtctggtctcgtctgggtggtacctaccgttttgccccagttaggaggactggggagggaggacaggagaggtgagagtaattgttactgggaagactagtgaggagggcgggaagagggagggaagagctgctatcttgcctgagcagatcaggagggggacgcagtgggcggggggagacatcacccaaagtccagtttagcaagttgttgattcttctggtgtgccagcccgttactccccctgctgaagctgaaggttggtggagtgatggagcgtggggatggtaaaggaggagtaagtagctttccacagactcccaggtctctggccccttcccagcttcttgggaaattgagagccctccaggcagacagagaacagaactagaaggaggggtggtgcttagtcttaaatagctcaaggaggcaggttggagtgtgaaactgctgttcttggcaacccagaaggctactctgcctgggggaaggctggaaactcacctgcttgtttttatttttccgagaagatctgtgctgtctccttgagcttataaaaacagaggaagcacagggtggcctcctcgcaaagtcaaggctagaagactcccttctcctgttctcttttccactcatgccctcccttatttaaaaaaaaaaaaaaaaagaaagaaaagaaaaaaaaaagaactcatttcctttcctaacctaggtaggcagaaatctattagcagagtgcgcatgggcagggcctgacaggtgtgttgtgtcaagaaagacaggtgcaaatttcctctgtgtctgtgtgtgtctgtacagctctagaccacaatgcttgctcgagggttggagaggtttatgaatttatggttgtcctggttaataggattgtctgggctaatgggaattgggctgttgttcttttgagccctgccatgtgagttcttggggtggggggtgggggcaagttggtatgtgtttgtttatttttcttaaggatattggcagtctactgctgaggctgtgtcccaggcttctgtctgccagtcagcccaaagcacccccactttaggcagcaggtggagggagactgacttttcctttgcttcctaccagtttatgcctatctcccaggtctgtgcttggcagagagagagagagagagagagaactgtcgtgtgtgtgtgtgtgtgtgtgtgtgtgtgtgtgtgtgtgtgtttgtgtgtgtgtggtgtatgctttggatagcaatgagtggtgtgtaactgccaagaattccaaagtcagtttgaaagtgttactgttgttaaagcttatctttttaagcatgctttctccttgcccagaaagaataggtatgtacataaactctttcaagtcatatgttaaataatctcataaagtagaatgagcctgtcattgtcccagacatgtgccaaatgtcctagatatgaatttgatggagaaagaaaatctcaagtacatgagaaggtaactgtgcttttctattctgatgcaagatgtgagaagtcagttctacagggaatttcttgcaagaacttctgagtatttccaaaatgaaattttttgtgtgtgttgagggaggaaaacgagagtattcacattaacttgtccatgggttaaaacatggacatgtatatgtaatagtaaaataggtgaagctaaggactgtggcttgatgtgtgaggaaagttgttgggaattcaatgtaagcactatatctggcttcttaaaacttgaccttttaaaattatctttaaacagactacttctgtagactgagttgcacaggaataggttggttggcaaatggtttttgctcattggctttgtgtttgggtagttattgtttccatgaaaatgagatcgtatgtgtcatttattctgtagacttcaacattaacgtccccccacctcccaaacacacacacacacacccaatactttccttggatgcttttgaagttctttggtaattaaaatgtcatctatgcctatgttcatttgctttatttttaataggggttatctgtgcttggcacttattgatattttatgtgtccattatgcagaattctatttagtttaatcaccaccttgtgggaaaaaaaagtcatgcatacataacatgcatctttgttctcactttattcatttcctagcatcattcctctataagcagcacatgctatcttaaaacctaagctggcttattctgtaagttgccagacttcctctttatttgtttaaaactcaaacaggcctcttttcatgaatgtcttatatcattttagggattgtcttgaatttgcagtgttaatataagaagttttaggtttcagattaacaaaagaaattataaaatgtgactgatgttataatatgaaaatagattgtgcatgatgtatcattataggattttaattaagtacctgtgtaacttggaaaggaaccatatacataaggaatttctcagacttattgcctgtgcattctcaaaggacatttagagagttcaattttctgcaaaaagaaaaaagtgtattttcttaagattatttcacactctgtcttatttacctatctgataagttgttactttttaaacaagtagaaattaatattttaggcatgtctcagaaaatgttctgtgttcattttgcaggtgaaaagtgtgtggaatttttgatgggatgggagaatcttaaatgaaatcttaaatgatttgagaagtatattatgacaggaaatttaaaaacctgataacgcaatcttagttaatttaggtattaacttatgtcaagtgagttcttcaaaataaatatcaaaggttttcttaacctgatagggagcagaaatatctccaatatctctgaagaaaaagttgctaattagcagaaacaaattcttgaatgtagtgaaggggacaatttaatgattcaggggctacttaaatcagaccatctgatttttcccctttgaatcactaatttccagattgatttgaaatattctttgttaatgatatcctatttgaaatttcataaccaggttgacccaagtagattagaggcccatacaaagatgattttctaaaagaagtcaagtgtaggcttgcacaatttcttcaaataattttatcaacaaagacagatcatctaaataatccaagcaggaaaccatgccaaccttacactctccctgcctcataaaagatttgtctgaactatctggataattaccgtaatgaaacacttctttgtccagaatctggactccagatagatgcagtaaaagttgaatcctcctccccgaaataacttctttattaaagtagagcacttaaccactttatacttcacgctgcagtgttcctttgaaattctttactgaaaattctttcctcctaaccttaagtcatcagtttccttagaattttgcatgttaaagagaatgtcagataattcagatattaaaggagactcttttggagtagttaaaacctgttttgattatacctggatgtttattcttctaatatctttttctgggaggaatctgctatgttaagatatgcattgtataagaattactaaagcatttgtgtaggttatatacgaagtgatgcaacaaaatatttaatgatgaaaaactctatatagactttcacattaattaaagaggggtttacaggaatagagtaagtgtatccgatcaataatacatttgggttcaaattctcatcagtatttttctgcatccttgctgatttggacatccaccagtgttgatcaaaagcttcatattgcctagtgaaactgaaaattaatgttaaaatgcaaatatgatatgcatcaataataattgcaggtgaaacatgatagcttaatacatatcttgagaaataaaggagtttaaaaaatatcaatgataaagtcattccatggcttcctttaaattctgaactggaatatcatggaagcacttgggaaatgtttttaagagatttaatttatattatggtaacgtaacagtacattttcttatgtggtaaatatattcatatagatatcttgtttatgaaatgtgatgctaataaagtgctgtgtcaaccggttattattatttaatcatgcctatagcttccatgggttatggttccagtgtgtgctaccactatacttttatttctaaattaaatctaagctatatggagagatatatttatttgtgcctattaatataatgccttgtcctggattatataatttatcttatttttcccatttgttttgtcttatttgttatgttccagctggacattttacaacaagacctaaaagtatttaaattcttttagcccaagacagatacaaatcgttatttaatctaaaaatgttgactgaaatagaattacaaaattagtttagtttggtgaatatcaagggagttatatcttgttcttaacagactccacaagcatttctttccaccttaggaagagcacagccctcctcttggctccagcatggggcagggatgcagctgttgatacctaggctagatgagaggaagtgcagttgacgcagaggtaaatggcagttggaaaaggaaggatgcctggggatgaccttgtgctcatcagcgacaccagtctgtcctttccaagcctctgtggcagagctgctcttcccacagcaaggatggcaggaggaaagtccagtttgggtgttagggtgaacagggagagaaaaaatactgcaaaaagtttgtttgacattttgattggagatccatgtgctttgcaggtgatagtcaagagaaaaggatttgcatacaaatagaaaagatgtaaaatttaaaaataagggcaataagctctattttggggaaggtgatatacacacagaaaaaagtcttccttgtaaccgccccccatgcaagtgtttctttgattaacagagctttgaaatgattcatcctttttcttgtctcagcctctccttgttctttctgtcatctgacagctaacctgatttatcagatctaatgtgtttgtgtagtatttgtcactgcatttttgtattcctgaaaccaattttattattagtgtttgaaagggtctcaatcattctgaattcaattttgaacccaatgttgtagttcttgagaactccatctccattctaagttcaggaaattttatcctgaagcatgcaaaaagtatttcattctcaagcatgcaaatatatatatatatatatatatatatatatatatatatatatatatatatataaagaggtatcattttgctttcatgataccctaaagcaggctcttttaaaatgttttatctttctatagaaaccaggagcaaagatttcatgaggaaatcactgtcacttaaaaaaatatacatattgttgccatctaagcattgagcattttcttgatttttacaggttatttcatgctgaaattatgcctatttgcatggatagtcattctttaaagctagccacagatgcagtcctagggagcacgtagatgtttttacaggtgaaccgaaagagatgggagccgttccagacactctgcatgctgcctttggcaatggaccctgttattgtgaagatgtgctctgttaagcaaacgtgaagtttaatattagataaacccaacgtgaaaaaaattttcattttcttcataaaatgttaattataaacaaaaagatgtgacatcttatatgtctacaaaatttgggattagcatcactagttaataagttacacaatgtcaagtgccttttatgaaattcaaagaaggatgttctctttttatactgtgtttccaagaaacaatggaagttcatatacaaagaaatatttccctttctcacacatttgatggacattattttctttcttctttatatatcttctttcagttttttctgtttttttttttcctttaatttggcacaggaaataaggttcacaaatcctgtatgttaaagagtttctttgggcattggacatattattttggcagatttaaacagaaggaaactagtcctgaagatatatttatctttatctcggtcaataacttattattcctcatattgatttctaaaatgtggtaacatccttgttttgcagtgaatccaactttgtaataatttgtcattaaaaggacattatgaaaatgtataaatattcttatagttacattaagatatatcaacagatatcatcttcacctatgattttacaagtaaaaaatgcatagctaagctaaataagcagacttataaaatgactattgtgcatttatttcaatgctaaactgaccatttatgtttgaaagatgctgctgctaagggtgttctccttcccattttacatatgacaaaaatattgtaaaattcaagaataaaagctctctattatatatttgcatttattttagagtccttttcctttaatagcgttaaaaccacactaattgtaatgcagaaatgcaatttttcatgtgaatttctcatagtctcaaaatttaaccttatttcttaagtatagagcagtttcatcttccttataatatgaatctcaatgcccaaaatttaatcaattggttgtcagaggctgtgttcttataatctactgtttcttctgaagataaacagtatcattttaggcatttgtgagagagaatcatattactggtgcttaagcagtttttgcttaatttttttttaatcttaatccatcttaaaccagtggagcagaaatatttaaaaatgtttcatttcaagcagagtgcataataaattgcaataattgtaatgtgccataaatcccagagcctatgcattttgcatttgattcaggattgaggtcaggaaatttggagaaatttaaagaaaatgattcatcagtccttttgttctgttggccagggtcccgggattcttgagctgtgcccagctgacgagcttttgaagatggcacaataaccgtccagtgatgcctgaccatgacagcacagccctcttaagccggcaaaccaagaggagaagagttgacattggagtgaaaaggacggtagggacagcatctgcattttttgctaaggcaagagcaacgttttttagtgccatgaatccccaaggttctgagcaggatgttgagtattcagtggtgcagcatgcagatggggaaaagtcaaatgtactccgcaagctgctgaagagggcgaactcgtatgaagatgccatgatgccttttccaggagcaaccataatttcccagctgttgaaaaataacatgaacaaaaatggtggcacggagcccagtttccaagccagcggtctctctagtacaggctccgaagtacatcaggaggatatatgcagcaactcttcaagagacagccccccagagtgtctttccccttttggcaggcctactatgagccagtttgatatggatcgcttatgtgatgagcacctgagagcaaagcgcgcccgggttgagaatataattcggggtatgagccattcccccagtgtggcattaaggggcaatgaaaatgaaagagagatggccccgcagtctgtgagtccccgagaaagttacagagaaaacaaacgcaagcaaaagcttccccagcagcagcaacagagtttccagcagctggtttcagcccgaaaagaacagaagcgagaggagcgccgacagctgaaacagcagctggaggacatgcagaaacagctgcgccagctgcaggaaaagttctaccaaatctatgacagcactgattcggaaaatgatgaagatggtaacctgtctgaagacagcatgcgctcggagatcctggatgccagggcccaggactctgtcggaaggtcagataatgagatgtgcgagctagacccaggacagtttattgaccgagctcgagccctgatcagagagcaggaaatggctgaaaacaagccgaagcgagaaggcaacaacaaagaaagagaccatgggccaaactccttacaaccggaaggcaaacatttggctgagaccttgaaacaggaactgaacactgccatgtcgcaagttgtggacactgtggtcaaagtcttttcggccaagccctcccgccaggttcctcaggtcttcccacctctccagatcccccaggccagatttgcagtcaatggggaaaaccacaatttccacaccgccaaccagcgcctgcagtgctttggcgacgtcatcattccgaaccccctggacacctttggcaatgtgcagatggccagttccactgaccagacagaagcactgcccctggttgtccgcaaaaactcctctgaccagtctgcctccggccctgccgctggcggccaccaccagcccctgcaccagtcgcctctctctgccaccacgggcttcaccacgtccaccttccgccaccccttcccccttcccttgatggcctatccatttcagagcccattaggtgctccctccggctccttctctggaaaagacagagcctctcctgaatccttagacttaactagggataccacgagtctgaggaccaagatgtcatctcaccacctgagccaccacccttgttcaccagcacacccgcccagcaccgccgaagggctctccttgtcgctcataaagtccgagtgcggcgatcttcaagatatgtctgaaatatcaccttattcgggaagtgcaatatccttttattttcccctcgaggaaaaaacaaaccaaaaaaggtttcccaaaaggttgggtttacacaatatctagagtaatgtagattagtatcttcttaagaaggcaacctttcccattattcaaaggaataggcttttatcagcatgcgtgtgccattcctgattgcagaaaagcttaaaactaagccaacatctttgcagcttccacaagttgttcactgccttgaggagctcctatttaatatgtgctttctcagcagtgttttttttctgctgttcttcctgcattatcttcttatccctatctcttaaaaaaaataaagaagtagatttagagatgagaaaacagtctcattgtaaatactgattgaattctctcagatattttttaaagatggtaagtttaatagaataaggagaaaagtcagttttcagatccctaagatcccataagaagaattctcagtgtaaaccatctgcaaggcttctggtccgtttaaagacagcccgatgaaatcttaggaagagcgctttacaagtgggaggttgaggaggaagaaaaatggatgtgggtggggagttagtctctctttcatctttaagtgagacttttttttttaaggaaatatacaggtactgatttattcagacagcatcggtctctctcccgttcacccaaggtctgttctttgggtctggtgcagctgcctctatgcatgattaacctctgttcagccatacacagaaatcttttgtcccaacatacacaaagcaaattattttggaaagcgagagagcacaattaaatataaaactcagctgtattcgacttaaaaatggctctttttatgattcttttaaattctgaaactgacgtttatgtagagataacagttatatttttttattaggcctatcccgaactccagctatttttaactgaagatttttttttctctctgtatatcggttctttctgtaaattttttaaaaatcttgtggtcgttggtcttttgggagtagtaaaatagtagcatttgggggcaggtggaggcatgtttcttatataataaacagatggatataaaatttagcaattaagttggctgtgactaaatttaggattttgagcaattgtcttgatgactagagattgacattttcatatctaagcccactccagaggctgccacgtaagtgcaaagtcccagctattggtggaaatatgttttcctggttagtggaggtcgtacttcaagccacctctcaggataatagtgtagatttctgatagggtgaactactagggccctaatcatgagtcctgcttgggcagttaaacatggagtctctcttatactgagcaagagaagaacattgtaacagaaagggaagagaaagatgtgggagatttctacatatacgtagaaatggagttttagcttggttgttgatttcacttggaccttttgaagatctaaaattcaatccaccagccatgaatcaaagctgcaccaagcaccatgccttacatattataagcaggcagtaaatattgatcaaatgattggaatatcgctgttggtgatgagaaaggcaaagtaagaagacacaatggcttgaatggtttttgtgccctttgcaaaaagagcatcttcagaggttcatgtaaggctaatgtctagggctaagaccccattgcaccccagagatctcttaacttcattttgaaccaggtagttgtgatagtgggttctttctgtctctctctctctcttacacacacacacacacacacacagacacacacacacagagtaaagtgacatgcgtgccaattttggtgaatatttaaagatttaatgccaggtttcaaaactcctgtaagtccacactaagctctttagttcaagatgccagtttatggtttttctttaaattagacttttcattataaccagatcattataattatggctgtgctttttgtttttagtcttctaggaaaaaaatcttttagattgctttaagtgttggctatgttcattgtctcaacctctccaaatccccggaggaattttgaggatttgaattgaaataagttccttttattttgatacatatcaaaggctttaaagaaaatatagttgcttcttcttcagaggcatgacttctcctttcttctatcaacataactttctgtcgagcggtgattctgttgggaaacacccgtgttcatgtgaaatgttagttgctcacactcagaattgtttctttcatatagctaaataatgtcggcctctcgtggcaattagtgattacattttccaccttttggccttctatgctcctattcttttcccccctctactattaatacattgcacttttaaccatttatctcattggtatattatttctcaggaagagtaagataggcaaacaaccttttctatagttcccacaattctgaaaccagtgaggatctgttggtttgtagagagattgggcccacttttctcctgtctctacctctgtatggcagtgtgttcttcccttgatttaactgttagtgtgtaggcaaaattctcaagcttttactttgaagaaatatctgggaatcacagtgagtgatgtcttacttcaattttagggatacggggccatatatgatccggttgtacagttattcctcgaaaagatcaatagaaatgggcagaaatgtaatgaaatggtacaactgtgattgctattattatgttttaatttttcgttcatggctttccaaactgttatatataatttaatttttcaggaaaaattatctcccactccaaaaggtaccatctgttttttgaacaaagtagctaagataagaactattaagaacaccagcttatcaggtcaacccattctacattcaccacattaaacatatatgttctgtaggatagaacacactacctcattatcccatctagtagaagggaaatagtgaatgtgtatgcaagttaaactgaatttcagtgcacctgctccaagggctcatgtcttggattttaaaaatatgttcagtatctttgcaaatgaatctgtttaatcaaatattaagttttattcaaattccaaaagaaacagtcagccaattgcttttcttcatgatgttccttgtcattcatcctctttgcatctcaagaaaaatagcctagtttaggccccaaacatttgcatgcacccagttaaagcacaagaggagtagtataagccgttaagacgtgcaggtgaagaaattgagcctgttctctgaaacagccggctttttctactcaacttttagggagaatgttagaaagacttgaagtttagaaaggaaaatggtttagtaatttgaaattaaaatccaaccaggaaccatagattagaaatgaatttctgaaatttgaaaccatccacagaaattgatcttatacatttttagaagtcttgtggaggctatagtacttatattagctagagcaaaacatgtagattaaagactaaaagactttgggctcctacactacccccctcccctgaaaaaaattataaagtaagtaaattaaaaaaaaaaaatccctacactacacagccctccgattatggtgaacttcctagtgggagttacgacttgctctatcactgtcattatgtgagagagtttagatcttttctccccattttagtttctagggggaaaacctcttagaaacttagcaaattagggaataaggcagaactaaaattctttaggtttcaaatgttttggaaaatgtaagtagtctcaacccatttgctgggaactgcagcacgtacaatctctagctacaatccagagtttagctggaaaaaaagaattttcttcctccgctttcacagcttattattctcccatttgcctttttgctgcctccgctgctcctcccgtggctgctgtttaggtaaggttatattgtacttggtaaacagacaacacttaggttctcaggttgtttgaacactgctttacgttcagctgcagtaccctgcttctctgatcttttatattcccgagcagatgtctttcattaatttatggatttatcatcttttcttttttttttcttttttcttttttttttttttttacacctggcagctgtctcaagtttcaacagttattgtctattttgcattacacatagaattgaatgtcatctgtcttcacaaagctatggctaagagaattgaggcacagccacatgagctgctgggacagatcttgtttgcgttccatcccccctcaccccactcccctttacctccttaatatttatttgtgctcattttctttcctggccttgaatggagcttagctcgtgttcagtacagctgtatgtttactgaatctattccatcatgagtcattgtgcgtgtgtaagtatcctggaaacagctagtgctttcttggaagaacagttgcttttcagcacaagcacttaaaagggaaattaaccaattggtcagttcagatttattttgaggagaaaaaaaggattatctaactgttgccttttaaatgtttcattagttatttttaatagtttattagaaacatatattttatgggaattttatcttaattacacaataagcaagagataaagattaattctgtgttccatttcaactgatcagttccaagtattaccaacaggaaacattttaaagcaaaaatgaacttgagaaatccaaatcagaataattttttgttagataaaaagcctctaaatactgatcaaaataaaatggatattttactttttttagataaaaagaacaaaaacatcttagcataaattagatgtattaaaagcttcaggaagttttggtagctcagtgcccatctaagaaacacagaaaaacactttgtattttgtatgacaccaaattttaaaagatttgtgacttccaattaaatgcatgacgttgtcttaatgtagccatctgaaagaaaagattagaacccagatctgagagtgtctgtcaaagtttggacttgcctaaaactcttatcacaaggcagtcgcagacagcttgcaactattatttcacttatccatttggacagatggtcctgaagtgtgctgggctcctttagtcttctgtatcagtctaatggaggttactggagggcctttcagccctctccttggcacaagaagtatgtcagtcataaattatcgtctttgtaatcattaaggatctcaaacaaaaacacaagttcagttaagctgctttggcttacagatataaaatcaaaatttctttctttagtgtttattttcagtttaacaaaaaataaaaaaataaaaaacctgcactacttaacttttctatttacagaccaaggtgatctttttaaaattgcatgggatattaaagggaatgttaattgaacaaattctcagcagaatatttggttaaacaccctgttataagtagtcaagagcttatccatattaatttgattatgcttctctagtaactttctggtttccctccattcttaagattagtcacgctagacttgatgaaggtcatttggaaaattttacctttcctaaatatctgtgtttatttgacatttctgcctaaggggtgaaatttttgttgggtagttgtgtgagtgtgtttgtgtgtgtgtttgcacacacaagcacactttcttttcttttttttcttatttttcttagacactcttctaaaagaaaatccttagagaagcttctaggaagggcccttaattgaccttgtgggggaccacattgattttctccacgtgcatcttcatttctgataaattataaagccattaatttgctgaggaaatggcagggccaggctgcggcacagatgtgaccagagccatcccagctctgagtctgctgaggagtgccaagaatctgggggagaatcaggaagcctggattgttatggttagcctcacattctcttgggaactgttttagttgctgctgtttacagatctaaaaggtaatgatgtttccagataaataggccttcttattttgggtaagtggccatttattgatctgctaacccacatgtattgatttgttagccccaactactgcgtcactctcaaaggagttaactataaatccaagacaggcaaattgtatttggttttggaccattgctttcacaaaagcaacagccccctccctgtcctctccatgccaaaactactcttcccaagttttagctattatttaaaaggaaaaacaattaaaaggatataataagataaaaagcaagtgagtcaagatgctccattagattaacactaaaaggtaaaatgtgaaacttgcatagcagtgttcaaaataatgcattttatattttcatgtacattagtagaataatttgctttaaactgcagagtgtggagagaagaacaaacagaactgtaattgcaaggaagaaaaaaaaacctcttatgacaagagttgtgtagtacatgttgggtgcatttgtctccttagcaacaagtgaatgtatagatagcctaccgacctaaagcaaggaaaatattttgccatcctcaccctaaagtagccaagattctgcaactcaattgtgcatcctcaccattgcatgtggcaacctctgacaggcgacggtcactgagcaaatggcagcaagttagcaatggatgccatagccagtgtcatataccttccagcactcccaccgcagcttgatggacccccagactctatggaggtggggactggagggagggaggtgggagtccttgtgcttacagaattgcttttccttaaccaattgcatcctacatgcaggaaggattgtcacccaatcacttgaaaaaagcaaagctcatgtttttttatacccgttatcccagctccaatatgctgaagacctacttctccgacgtaaaggtagggactttttttattcttaattttttcattttctatgcatgtggcagtaatttgaactcccggaagttaatggagatgaatgtggaattggtttattcctacacctgtgttataattgatttaatgcacttgtctttttgtctaaaggtgtgttaagcaaagatgccacttgtgtattaagattggaagactggtgttaataagttgcatgggtttccaatgtagtctgaaaaacttagcctctgtctttatatgtttgagtagcttctttgaagaaatttcagctggtaatggatgggtgtgctttagagaatgttttttccctcccctcagcaacagtaaactgtttctgtttttgtttctgttggtttccccatatttgtgcttatgaaagcaaactctagcacctctttttccccctgtcgaaaaggagcgtacattgaaattctctatgcagtagctgcttaaaaacaaaagtgatgattgtctcttatttacaacttaatttgttgttgatgtagagtacactgagcataaggagaatgaataaagtgacagattcaggacacattattcaaatgaggatatgaaagctgtcggcctacagctgcagcctccctcattctacagaatattgggacctcctggttctctctgtgtgtgtatgcgtgtgtgtgtgtgtgtgtgtatgtgtctgtgtctgtgtgtgggttttaagtaattgtttgcatcaacttgatgttgtgttaatcatctgtaactttttaaaacatagattgggttttgatgatgataatgacacacatggtatcattatcccaggaacttgataaacactacattagctgagattagtttattaggggtgggtgttttttccccactcctcccctgcccacccccatatgtacaagttcttctttctgccatggagaactcacaagctgccaaaacacactcgctcttccactgctccccgcacgcagcttgttttgtgcttgatgcccaagtggcttcattggccccattttgcaggccaactcatttcagtttccttcactggtgttttatttggccttataagaaaagttctgttttccctcctgtttgcttttgaattgtgtatcaacttcagccttttatctttctccttccctggctgtgctccttaagtggaaggcttgttttctccttgttcagcaccagcaaactgggcaagatggggaggcagggaaagtccatcacgtaaatgtctggataagactaagtgagcacaaacaaggctgagtgacacagaggccaggaaaagggtttgggctttgtagaggacaatctagaatacacaaattgaaggcaatttgtcacctggttgaggactgaccagcttctagagtctagtagaacctggtaaagtttgtcttccagggaatcctcccaacattttagttctaggaggggacatggaggacagggagaaaagggttattgtgtgcacatatgtgtgtgtgtgtgtctgtgtgtgcagatgtccatgttactcattccttttagggcaatgatcttcagtgttgtgaaataataatgacaataacttatattctttgcatagcaattttcacccagaagtaggccaaagagctttaccaactgcacacataggtgtcactcacccaccacggaaacacagccacctggagggtgggaaacagcagccattctgagccaacactacccaacagtagacgtcaatattagaaacaatcattttttgtgagagttcaagcatgcgtgcatgtgtgtggtgtgtggtggcaagtggggaagattattgatctgtagctttataaataccatgcaatacaaaccaacaagaaactgttcccattcctctagaatgcccctagcaattcagctttgcaaataaccactgactctgtgtagataacaatggaatacctgggtgaatattttattttcaaaagcactaatattcagattgttgattctatccataccttacccatactggaagagaaggctgttaaagtatatgtgagtctggttactaccaattatccactgtaatggaggggaaacagtagaacatatcaggcaaagcagaaaatcactgaaggtcacttctcttttatttttggaaggaattatacatttttaactttcctaattatgttttttctttggttagtaataaatgaatttgtatttcttgagcttacactgatgagagtagaaagccatgcaaagaaagggaaaggtagtccaggcaatgtggtccagagactttccagaaaacaatggcagagcattctgggatttcttcaatattaaggataatcacagatgtgaatattgacaatgtatacacacacatatgtgcatgtgcatgggttcacaatacacatatacatatatacacatatctatagcttgacattgacatacagatagacaagtgtgtctatttatttgcaaggctgaaagaaatagatatttctttatatatgaatatacaatccaaacttttattttggccaggattcaagaaatcactagagaaattggggaagagaacttagggtcttctcagaaatgaaacctgcatcatttatctggaacaagatatatgcatgtatctatggaccatgtaatgcttgttataatgacatgaggctctacttggtcatggccacattcatctaggagaaaattcctaactttagtaaaatgtactctttcaaataataaagttattttattcaattttttttttttgagacggaatttcactcttgtcacccaggctggagtgcaatggtgcaatctcagctcactgcaacctccacctcctgggttcaagagattctcctgcctcagcctcccaagaagctgggattacaggaatgtgccaccacgcctggctaatttttgtattttttttagtagagacggggtttcaccatgttggcgaagcttgtcttgaactcctgacctcaaatgatctgcctgccttggcgtcccaaagtgctgggattacaggcatgagccaccgcgctcagccctcatattttatttagtgatcataagttcattttgcaagcaaaaacaaaaaacaaacaacaacaacaacaacaaaaaaaaccaggagaaaaaaatgtgagcagaaaatatcttgtttcctgaatatggtataacgtaatggtccatcaaagccacacttggaggatagagctagatggggtaaatcctctgacttgctctagaaggtgagtcatgccaaagtggtgcccactcctttgtatttctccttaggaatggacacagtgcttaactctccacaaatgacttccacctgggtaagaggtaaatgcttttcaattaccttggaacgaaagaggtagagggaaatcatacaattcagagatgttggcatggcgagagttcttcttctacaggggtgatgtatatgaaggatgaaaccagggccgacctagtttaactcctagagcaagaatctaaacaaagttctatgttctcacagagagccaacttaattccctcataatgacatttagccaaacaaaaagctcagctcatcggggctacaaatcctttgagaaggacaagtggacaaatgtgagagagctgccagggatcgatgggccgcaccagctccctgttcactactgggtgctgattttaatgtacaaactaataactcttagaccactaagtacagcagattcagtgtcattttagctttgaagaacagacgctcacagcttttcaagccggcagtgttaaatgatgtatctcattccctccaccccttgagtcaactgctgcctagccagattaaggtgtcagattgatttgttttatacatcttttgaccatgctcattgaatatttaggaagtttcttcagcccatattgaggctgagatgtcccgtgggaagcattaatcaaagtcacagagactcgtacactgtggaaacacagcctctttattgtagcgattagtttttgcagtaacacattaacacactacagagctttcctttatagaacaattgatccttttcttgtaagccactacagaatgagggaaattaactctttaaagtttaatactttttctcccccagtgtgaatatctagaaaagcgggggcttgcttttgcttttagccggcgactaaaactgaacaaattttagttcacttctcctggagggaaaccctgttccttaggctgttgggctggtcatttcgcttgcctcatgtttggggagtctgttgtttttgtccattctttctctctggtatttccattctccaacaataagctttaaatctccctttatgtcccattcgtaaataatggcaagtgcacttacttttttgtcctccccattaggtcattcgtgaccattctagaaaaaaaatacccttctatttttttcctctacagtactcttgtccatatgagacaatgtcttgtaacaatgcagaagcctaatctccatgtcaaagcaattttcattccccagtgcacagcctgctatcattttgtaatgttttgtttcttattctaaaagaattaaaaaggaacagtaagccgtcacgggggcctgtagtccttatctcagtgtctggaaatttggacagtgtattttactgctgagataaaatggaaagaactccaagttcagcaaatcgtaatgggtttaagttctattgaaatcggcaaccagaagatcagataatgggggtccttcagttgtctttttaatcgggttccccgcgaggctgaatagagacagagcagacacacagagtgaaaatataattcttggataggttaagtacatgtttgaactcttgcaagcagaagcgatttgctgatgacttaatcattttctggtcaattatctgtaagggcccttgcaactccatggcaattatgatgcaagttggccttttgggagaaacaccagtctctctgcttctgtttccttgtgacttccattctctgccataaattttcattcatttattatctttgctagtatagaaacaactttctgtgtagtaattagagccccaatacacactttagctgtcatcttgttggagtctggatgttctcatggcctgtgtttgataagtgctctttgttgatttttgatgaatgtacatctttttctgggggcccagggaaggggatgcctgtgatgacaaaaggcagggggttgtctgtcagcccgcctgatatagagctatggatttattggttttgacttggcaagttgagactcatctgtcctttacgtgagcagaggactgtcaataaggatggtatcatttgcagtgcatccagaaagacatcttcatttcaaaggtcatcaggaaaccttggtaaacaaagttttaaggcctaaccatgttatagtaacttggcatttaaaaaaatgtaataaagctcctgtctatgccatctgtgtactgtgtcctaaccatgcctcccaaatggcagagataccaagggagggggacatgggtcttatccaatgctggcttcaggaagcaggtgaacaggcaccaggagctgaccagacctcaccagacatgaatgccgtgggcaaacattaagtggaatcacagttggatggacatgggaatcactcattgccaaaaaaataagcaaatgccaactcctcccattttgtgggaaggccatttgtctgcattgaagggggctgtaatgcggtgatacaaatcctcacttaaaaaaaaaaagtatatcaaactagtggtagagtcatgtggcacatcacctctggtacatgggagtaacaacacttccaggattctatggcttcaatgaatgtccataagaagtatataaatgcaagttgttctactgaaagatgaagaacaatggttaaaaataaagatgttcggcttaaggaaagtctgatttagaatgtgacttttccacttgaaaggtagagggttgtgatatgatttccattactgacaggtttttataatttcttgtaagtatattcttcctcttgcctctcttgccaccattttggtggagttaaatacgtatctttccaagtaaagaagggacgggaacattaaaaatgcttcagacacttaaaaaaataaatgaagaaaatggcaatgttcttatccttttcaacatttaaatttaacagttcaacagatgcattacctctcagctcatcaagtggtttagcaatttccgtgagttttactacattcagatggagaagtacgcacgtcaagccatcaacgatggggtcaccagtactgaagagctgtctataaccagagactgtgagctgtacagggctctgaacatgcactacaataaagcaaatgactttgaggtaggaactaatctttattttttggtcatctcccttttccttttttaaaaaatttattttctttagaaatgtacccaaatctgtttttgtgttggtttcgcatacaagcatcccccaatagagtaacaggtagagctgtgatgaggagcttccatagtccccattggaatcatgaggctctgacccactgccattttttccccattccctggcttttcagcttgtgtggaagactcatttggccacagaaaagggaactgtagaatccaaagaaaaatggcagcaagcagcaaagacagagtgattcattttccaaggaagaggtccctactccaatagacctttttcatatttaggttctgagaggtcaatgagctgatacatgctatgtgcaatggtagctaccaatgttattttcttaaaaagtctagaaacgttgatgggggagtgatcatggtttctgactttgacatttagtccctttgtggaggaaatggtatgataatttactaagtacatagcataagagatccattgacatctttttttgggattttgtttctgtttttgttctttttggaggagagactcgtgtgttttgcctaagtgtaccttcacaagcatgctgctctttgtacaaacactctcatacacacttatatatatctgtgacgtgtatattctagatccacacaaagcagcatagagaattcccagaaagcaatatccatgcaacaatgaaagatgtgtggctatgagtaaggcatttctttatgggctaatgtggtgcctcagcaaacagttttcatcacaacgtgatgactctctgtgagacaacactagcaaatctcccagtactcacaaaggcattttgctgagccctgctggctgaggcaacagtagttggaggtgggaacatggcaagaattctgcaggctgaactccctgatgatgagatcagacaggctgtggcttgacaaagttggtccatttcttgtattatcttggctagatgctgtgccatcttgagggtaggaattttttctccaacgtctgtgtgcacttggaccttatgttaatattcttgctttcttcttgtagataggtatccaggaatacccaggaagttccaaatttcaaaggaaagaggacaccttggcctcgctctgtcaattaaggggtctgacccctagtactcttcctgcttgcccccctcctttttttcggctcttgtccctacagttcttggcaatgcagaccagttatagtggcttataaagaattgaatatggaagctcagcaatggggaagtcatagtttttctttgaaagtttgagtagttatagtgtaagctacctatttgtctttgctctctaagactaatatattttttgccaaatgtgtgataaatgaagtttgggtggtgtgtgtgtgtgtgtgtgtgtgtgtgtgtttgctaaatacattaaaagtgagaattcttcgtgtactgctccactattttaaaatctgtttttaaagtctcagttgtaatagagcactggctcactataatgacagagcactagcaggcttcttctaaagctgaagaatatgattatggctaaccattttaaagaaatctcattaagagcatcttttctcccctgcctttctgctaagcctgttgccctaaaccttaagctaagagacttctgtgtgctagtgaattatttacattacatgatgacataagtatctgtttggcagcatacatcaagcttcatgaaagaattgcccaagattcatgagatgacttctgcatttttgctatataaaatacccaagaggacaagtccttaaagtgcgcacgagggttttcgggttgcttaaaccttacctggttggaatttaatccgctacccacaggccaggggccaaaatgacacaaacaggggatggctggcatcaggaggtacccgacaagctgctccatttagcatcatctaaatcctctttaatatgattaacatctaatatttctctctttgtgaatcatatccacttccagccaggccacctctcctttatctgcagtgtctattttaagactgcttcactgcaaggagtatggggcccgggcaggaattttgtcacttctcatgtgacttcggacagttattggactattctggatctgattcctccttcagtgaaaagaagggaagaaagcaggaccatgcagtgtgtcctgccccctctactcacacacttacacatccatatgcacacacgcgtaccgaccaccacacataatcctaatatcacgaaatcgtttttcttttagcctctcggtctggctcatttactgacaaaagtttcagataaggtgagcccttcttttccgtgcctttgtgcatggaggtcactgcttaagtgagatgcttaaaaagccaccgttcttatcgtggtagctttgctagtgtgggccgtggctgagagccaaaagtagatccggcaccttcagctgaatacctccactgatactgtgtgcacggctttacttttgtatttaagtttctcctcttaaggtcaagtaaaatgaacctatagtttaagtattagcaagtgaagaggatggcaaaatggagaactgtgctacaaacagagctaaaccatggtagagggactttgaagctacgtctacacggtgccccaagatccagtcgattccaaggaatcgtgtcacccagcttagtaggagctggtcaaacaataaaatgtcttattgattgtattcccagacttctcaatcaattgttgggaacaataataaaatagctaacatttattgactgtttactaatgacctaggcactcttctaagtgttttaccaaaatagggcttatttaatgtgggtaataataatgacagtgataccaatataataacaagaaaaacttcagtttgcccaaagctttactattcttcaagttattctaactgggcagaggcagatcgagccagggagagagaaggaggtttgacgtctcttcactactactttattccttctttctctcctctaccccttgtcttctctcagccttctactcccatctctgcctctgtcagaagcttgctagtggcacctttgtcactgcttagcaccacctccgtccagcccctgctgctgatggctctcaaggctggagaggctgctgacccctggcctacaggaaaataaagcagatggggaaagtttatcagcagcgaagagggagtggcttgcctgctctcctctcctagaccctgcatttcctggcctttatgagtacaggaccttctaagtggcagtagagcttgttctgccttttgtatcagtttacacaattgccagaattcttggcacggtgtgcagacttagggtggtgagcgtttgagaagacccaagggatgtggaagaagacacccaaggggaaaaatacgaaatacacttttagtttgtgctaaagggcagaagcttggccatatcacaccgggtggggtgtcttgcttctgtgcgtgagtgtgtgaggcacgcaggagaggggtgtgtaattatgtgctgtatccttcatttctgctcctcacatttaatgagattggcaacaataaatttgtctttccaggtgtgatggtatatatttctatgcttcattctcacttcactttgaagggcttccaaaaaaaattttatgggcagaaagagcaagtttgggattccttcccagtttttaaatcatactgatacttgtgactttaggggcgtatgagttggattttatcgcttttgttgttttcctcacaactgtggcaggaaaagaagatgacgatctctgtcagtttctgaggctggtttacctgttttgcaaagagctccaccgagacaactaacttgtgtaactcacaaaggttaattgcacaacgtaaggagccaaaagacatagcagctatatgtgcagctgcgaaaggcagaatcatccaaaggttggagggtttgttaccgcctgagtgtaggttgagaaaagaatgtgccagattccttcatccagtcacattgagctctctttctcattccagggtaccgggaggtagtgtttcccacgccatggtaagccacacatccctcctgggcccctcagtggctagtcattcacctgtaggcagggtctaagtttccagtaagaatgacagatctcccctatcctcgctaaaggcccaggtttggggatggaaggcttcaaaataaattgaatagggaacttgattcactcattagtggccttatgaatgccattttctaaggtactaatacctcactgggcagatgctccatcttagagactgtgggtttgacatttttctgggtgacacatgacagggaagaagggtacttccgcacacctttgaatgtgttttcttactttcctcttggaaatagaaaataaaaaacaacaccccaccccacccccaacacacacacacactaatacatacacacttgctgaatatgttctctaccccatacctacccttttcttaacctactcccactttcaatagaacccacatttcagaagatttaatatatttggaagacttttattcgcattgtcatctctttaaagaaaaatgaggacaggtggatttaggaagcgcttccctctgctccaaatagatccttaaatatgagtgatcgtttagaaaactggcacatgagtgagagcctttcactgctgttgcagtcttttggcctcaaagctgctgagccgtttaaataatcgcataacacactcttggtgggtggcgaggaggaaaagaaacccttaccatttcttcccttgccagtcccaccgttgacaagccaaattgatcttttaagagatcaaatgaatgttctctaaatatatgtacacacatggctgcctggaaacgtattccttccacagaatgattgcctgaaatttgaaggagagcgcagtaaagacaccaggttggaagtggggttgaagggctagggggtggagtggaggtagaattctatgcgtgcatgaggcttcacttttgtacactgtccttttgggattcaaggtgttcatcagtataatgaagcgggcccattgatttatcatctatttggtaatgtcattgcatttttagctccctgtgtcttttttgtcattgggttacattcaagcacagtaagatcaactttaaaacctccttactcaacagctttattagttatagcattccatgacctttctcaacattcttaaagaaaaagatacagtgtaatgtcgctttactttgcttattgtcctttgttggggtgaacaaagcattttctacagtggctatatcacataattatacagctttcaatagcagtgtcttggcacatatcaaagttcagaggagcctttagaaaaaaaaaaagatgttttgtggcagcctagggagggtctcatctttccttcagaaaatagttcaaggctcttctgtcaagcttccctacttagagctttttctcctcctgcttcataaagtttaaaggggattcagtggagttctatgatctatttcctttgaaagattgttcctcggcacagagaggccctttgacttcaagagttcacagattcatgtctttaggtatcatatgtctgaccttatcagttactccatttaatgtaggagaaaaagtctcaactctttgtgtttgtctgttttgcctctgtgaaatgatttggtgaaaagaccatcctttttaacacaccactgagaggccgtttctgactgtaacctaccctgtggcttttctctctttaaaaaaaaaaaaaatcgtccttgtgttttgtgtatggatgagttcacagtgagaatagaattatacaagggcaggcgcacacacaaaaaaatctttgctttcctccctcacctcccgcacccccccacaaatgatctattggctctctcggcggctgtaccccaacaggcgaagccatttagcaaacacagaggtagcggctgtggtgctgggacagtggtgggttttcccttgcttcgacctacccctaaggccttcataattaattgtccttcagcgatgaggaaagttcagaaacagtgtgtggagtgatgcctattgtctgatattcagttctccttgccttggttctttttcttcatcccacaaagggttatcaatgggagaaagagagcaagttctcttctgagagctgctggtggtggctgtagctttcagtgggatgttatcattgtgttcagcccatcctggattaaatgtctgaagaagttctaacaaccttttgaaagacagcctgtttatttcgcctagatgaaacaaattcatttagcaaaccaaagcttgttcgaagttggccaccccttttcacatggcagataacattatagatcaaatttcttcatttttccccccgcaggatgttatttaacttgaactgtttggttctttgtcagtcacagggcagaaattttaatgactattcactcactgctcttaaatacatcaatattaatttacaataatacagtttttgctaacatcctttttgatgaagcgtagacgtttaatacttgaaagcagataattagtttaaaaatattgtttctccttcaatgactgccttcagccaatcttcaattctatcttgtaagatgatgtgaaacaaacgcattttgtcttcctgcaccccccaatttttggctgagatacaaaataaagatgcagtgtggagagagctatttgagaagggtaggaaaaagagaaccgtctattaatgatcattatactactgttcctgttaaatagggtgaagccaagaaaaacaaatataatcgttcttccgaggagagcagttgaactagtaaatcacagaggtttaaaataactacattgtagtgttcatgacaacttcaaggctgaagggaaccatatttaaaggcaatctctgtgtctcttatagcagtttcttttggaggaagagaccgacaggatggccagaatcaattctgccccctttgctctttgaaaacaatttcacaacagaccttttggtatttaaagagaacctgtatatggaagttgacacaactaatatagtcataccaaaaagggggtcataaaaaattaaagttcttcttatgaatctttcatgagaagcaatgaaaagggacactagtgtagccaagttctttgtgctacaagctcttcttccgggctctgagctattgttctttcagctcctcaaacagactttcactttcaaactgacaaaagtcacttaaaagccagacagctgtactaacacacccaccttactgagcaagagccactggcaggtgacaaggcctgctgagagaccttgttgaaaatgagcaggggtgactttctcgtgccttaacgttgcttttgcactcactttgagatggcccattgactgctctttttgcccccccaccccaaaacaggctccccaaaatatgttgtgcattttctttgcagtgtgcaacattgacatccgtgatcatatttctgccttacacctgtgtggctaggcacgggttctgggaaatttgtgcccttctagcagaagacagggagtttgactcacaaaactcctgctgcctcttttccttttgcccctccattcagttcaaatctcacttaaggttttcagatttctgttgcctcactagggttggatagaaaacacccaccaaagatgggtgcaaacctcaccttcggatttaagatctaggcagagatcgttaggtgggtagtcctgcctgcatcccgaccctcagggcagcagccgtcgtgggccatgggaggcctccctgtgtgcgcattacaggcctcccctcccctgtcaccttgtgtacagtctggtctgtgacactgatggtgattatgtcattattttgctctgggggccctggcacatctgcagagcccaagcacatcttctttgttgcgttggcaaatgtcccacgccgcaaatgcttcattagccctgctgccggcctccttgccagacgcctgtgcccaaatcccggcttctttttgctccgttcttttgtgtagctgatgatcatgtattcatcttcctggttcttccccattttcctcgacttctgaactccagatgtcccagttttcttgcccaaatcactccgaagtctacaatgcgaaatgaagtgactctttacccttgaatccttccccactcctgaccacctttcctactttttttcccccaaatgaatagtgactttgaatagctcgccaccatgaagactaacgttttcaaacttgcaatctgaaaagacaccaagtgattgcttccagtttatgatgagagacagggttagaatgagtttggcattattagatattgcttattatctgtgtgccttcctcctccgtccccactctgcccccctcactatttccttggatcctttatttgcacctgtgcattgccacattttaccaattttctgaaagcactttgaaatgtgagtacagaaaatactcttcatgcctcgctgtgcacgttacagtcttctgaaggttcctttctctaagtgaatcttcatctccactctaccctctcccaaaaccactgccccctccttctgccccagccctcaacaatgacctactattagatacttacagtgattaacacttggctgttttggaaacagctaaaacatttctctctctaaagttttattctatatatctaacagagccacagcttttgtgaaggtgtactggtttctacattagctgcagtaaattttagagcttaatatcttgggctgtgatggatactacataattggtatgtttaattttcccttaaatttgaattaattgatctgtgttagcatattatgagcagcttttccaatagagtttaactagtttttaaattctctaactactgcaacataaaatgatttaaatgtctccatctttgagcaaaccataagattttagttttcaggtgtagttaaaggagttaagtgtatattttatggaaatcatggttagatcactgccatgaattgtaatttgaaattcaagacaaagactctgttaagggttaaagaaaacttcctcagaggaatgagttgccacattgtaccgggttgctgagattttcaaatacctatcaaagaggggcacaagaatatgcatgttgcaaatattaggaccaatgtagccaacaaggtgagaagagaggtggtcagatcaggcgggtgggctccccaacccattgtcagccctgtgcagggagcatattgggagaggctggtacctgtcattgaatcatttttcaaaaggctcgagatatatccaaaatattcctaacctcccagttgcccaccattatggttttatcacccatgagttttacttaaaccttttttaaacttaatctcattgtcagaatataccactccttaagataataattctctaagtgtattacctgctgggaaaatactatcttctttttacggctctaaacgtgattcccctagaactccacagggatagcccttgttataatatcctgggattgtgaagagggttgtgtccatattctccatttcctttctgattttacagactttgatcattactccctcttaatcttcatctctccagattaaggagctctaatcctttttaaaagcctaatctcatacagtaagtgggctgccctggatcattttagctgccctgctgtaatgcgcttccagcctgactgtgtttttctgagggacagttacagttactaactcacacagcagaactccaggtgtgggcagtcatgccacggtttggtgatggtgccttgtgcacacccaatgggacttttttgattaccccaaaagtttatcctcagaagctggaattcttgagttggatctcagtagtgcttattggttaaaatgatcctatgagaccagctgatcagactcttggcaaatactctggcaaatatgattgtgtctataggacatacccagccaaatagaaaataggcagatccaccctgccctccagatgttttcagtgttcttgtagatcaagcactggggtatttgacatcatgaggagatagccttagtcttgaacttgagtctataataatgacagctctgggggaaagctccagtttctgctttatttgatgttattctcaggcaggcaatgaaatgttcacctgcaagtagtcaatattttatataaaacatccccttgaaatcttacaaagaaaatgctttggggagtctttccactgtcagtggtcctggatcaataccgttgtaggacttacagcatggactctccagccaggccctgggatcaaatcccagctctgctgctttctagcagtgaaaccctggcaagtgtcttaccctgcctgtacttcagtttccttatctgtaaaataggggatgtaatagtgactacttcacagagtgttgtgagaattaaatgaatctacacaattgtattagcacaaagtaagtgctgtataagcattcacatttattcatttgcagagccaagtaaatgttaccttgttgctgtgacatctgtggtccaattattgcaccatttcctgctgaccctaaataggaaagtaaacaaacgggcaatgagggagctctcatcagaattggaacatatattcaacgtaaaactggttttcacaagagcaagtgttcctgctctgaatgtggctgaaaaggcgacactagcctggaacagctccaggactctggggtcatccgttccagatgagaaggacacgatgagatgctgggggtggtggaaggagcactggcctggagggtctggctctggccatacctgcctcattgtggtctactgtgctcaccttttggaaagtgataagattaaattcaagagtttcattctagctctgaaattttgtgactctagagtagaggggcagtttcattctagctctgaaattttgtgactctagaatagaggggtattctgcattctctaaataaagtctcttttgagtcttggtcatgttgcaaagctttaagcagtgagtatagaggccctgggaatccagatggcttccatgtgaggccccttctaccctggtgactctgctgcagcttaattatctcagtcaaaatctccagggtgcccattttcgttttctcccaaggccctatttgcagatctgaatctcaacagtgcccttggagacatggcaattcccttactgggattatagagactaatttttcaaattcatacacaatttattgactgaattggcactatcattagacttgctgctcactttatttgttgccttggccagggtggccaaacaatgaggaaatttgtcagtgaagccctcatgccattgggttttctcacacattccatgcaggcctcaacacagactatcagcatttataatatgcattaacttctatataatgtacgtctcctctctttcagagcagaattggctatgtttttttttttattcttttatttttttatttttttgagacacagagtgttgcactgttgcctaagctggagtacagtggcatgatttcagctcaccacaacctccacctctcgggctccagcgattctcctgcctcagcctcccaagtagctgggattacaggtgtgcatcactatgcccagccagaattggcagttttagatgatataactaccttccctactaagcctacttggtagtgtttgcaaaagcaacaccacccttttctttaaatattccccaaatgatagtaatatagatcatgaaagtcttttcccttgagattgttttgtatgtgtgagagtttgtggttgggaggtattgagtcctcatacaagccatttggatatgtattcttcatatttcttatggctattgcacctaagttctgttttcttaaggctacattaacattttaaattagaatatggtgctaaaagtgactttcagtaaaaggtaatgtattccctgagaacaagtaaatacttgggcagggagggatggtttgagtagaggtgaaaacagagaaatgatgggaagctgaccatatgtagaagaagctgaaaggtcatggtttcaaggccactgtgtttcctttcatttagagcatccacttttaaagatttatcattttcagtgacctgaaggcgtacaagataatctgtgtagatacctgaaactgcctttcaacaaggccagtcctaggtattgacagcatcctaggttgtcccaccctaaacattacctcaagtcccattgggtaggagtctagtggacttccaaaagcccccgagttcattctgcaatctgcctgtctttgcaatctatttacctgtcttgaaaaagggattccaaagcccttcacaagctcttaagtagcatttgaaatacagcccatccttagttttgcaaagggtgattgcagagaaagacaaatagaattccctggaaatacagaatagaatttctctgacagaacaaagatcttgcagtcaaaaccaagggatgggattgaggccaataatccccatcctttcctaaagcaactcggatattatttggggtgtcataagctattgccagcagagtgccagcatcccccatgaacttgtgttctctgaagctctgtctgatttcctaccatctgtatcacaagcgctttctttggtgtttactatgagcaatccctttctcatcacaacctgcctgaaccccacttcctaacagcttctccctaggctccttactcacattgctccatcaatagcaatacagggcacacagactagttttaatattagcctaggcaaagcttaattatgaaggtaaagctgtggcagaaaacaatcacgtaatacattctcgaacgaaacaggagtaactgtggattatctgtgccccagcttcccttcatgcaatattggagtgtttgtgctatgttgtttttggataatgtcccatccaagaatggcaccaagcttggccctgcttcttttaccacctcacccagtaattgtagcaaaagttaaacttcaagggctgtcagcttgtcttgaactcagacaccaatggcaccaaatttacggggctgacttaaaggggaatttgttaacactacaaagtgactggtatatgattgcagggcttatttttccacctaagtattgagctgatttgtcagatgtgtcatgaagcagggatacattcctctgtttagcacatttaaatatgtactggcaggaaagctcccaattaaacgttcctaatcagagcagggtaagactgaagtcttcctggtccttgaccaccacgtgtgtggtttattaactctgttcccgtagacataggcagccttaactccatcgggggaatggtctggccttacaggtcgaattcaagtgaatcaatcgaactatcctccaagatagagcagaatgaaagacccaggatcagtgcagaatgaaagaccattaggcctctagaaaagctgttagccctcaagtttggctaaaagcaggggctggcaaagtatggcctatgggcagagctgcccctcaatctgtttttatggcttcaagctaagaatgacttaaatttttaaacagttgtaaaaaataaggagaatatccaacctagaccaaatatggcccacagagcctatgtatttattacctggccctttactggcaaattttgctgaccaccggctgaaggttttttctcttctgtgggacatgaactctctgagattccttctagttctgaagttccaaaattctgtgattcctttttttttttttttttgagatggagtctcactctgtcacccaggctggagtgcagtggcatgatctcagctcactgcaacctccgcctcttgggttcaagcaattctctgcctcagcctcctgaatagctgggattgcgggcgccagccaccacgcccggctaatttttttgtatttctagtagagacggggtttcaccatcttggccaggttggtattgaactcctgacctcatgattcacccgcctcagcctcccaaagtgctgggattacaggcgtgagccaccgcacccggccaattccatgagtctttgatggaatagtcttggtccagctcttacctgaacagcctaccagatgagcaatttctgcacagtgcttccagttgtttttaagatcttaacagtatctgtgtagtatctcagggggagagaatgaggtattaggttttagtttttgatgctttttccttgattttgcttgcatatttgtttgtttgtttaaacttggaatcactttttaagacctatgcagagtttgggagagaaggaaaatttgcttcatcgcgaccaataatgtgacaattatgtttcctaacacgtataataccaagacctccatgtgtgagcaaataaactagccacttaaagcacgttcactgaccaaatttcagccccacgaaataattttgacagtctctcatagacatttgtcattctgctcctagcaagctagtactatcttctactggggctatggaagagatggttttacttaccttgatctctacatgcagaattgccaatggaatacttacataatttaaaatgtatgcacaatttattaaacgtagaatagaagatgttaagacatccttttctattacctgaaagtcacaattattcgaaatgctcaaatctagaacattgttgataattatataatattttaacaacacatatgttatcaacatcataatgctgtagaaattttattgtgaattttgtattttctaaatactcttaaaagacaaagactcaaattcaggtagaaaaacaaagaagatactcagggtgtatctctgcccttcattcattgctgtggtcagagaagtctgtgtgaggggtttggccggtagcagccccccagatccgtacactgcagaccaaaattcagctcctgtgatgcttttccatggagtttccctgtcaattcaaggtagatcctcaacctccctccttggcagtttgcatgtgactgttcattctttttattacatttcctccagggggccattttcaccatgtcatatctgtttgctatcagcatttataagggctggtgtggcattggaggatgtcaagtggtctgacttggaagtgtactgccacaaactccatgtaggtgacaggaggagagacctgctttcccgttgccactttttggattatccctgcaactctttccgtctggctgacaaaaaccttggggctattgggtggctcatcacttctgctccttctctagcctttccctgggtttgcttcccccaacccccacaccccctcgcacattaacatgacattgcctggtgagcacagaagagagcagcttccaccagctgaaacctctgatctcaaactcactagagagtttggcttcgggattttggcaagaaggccgattgcccatcaggtcagcatgaataaagatttctttcttcccttcttttttaaagtcaagcatcaaccgaaactgctcccaaagctctgtctctcaagacaatttaacccctttcacctaagtacattttctattttgaatgcatggtactttgttttattcttttcctgtgagatgaccaagaaatctactatatgtaaaatttgaaagccaagtcaattctaaaccaggcttatcatttttaaagtatgtttatccagctttgtagtaggaacaagcagactgtttgaaggccacatacttttcaaaccctggttgcaacacgtctgccccgttttgaaactgtctttatctagccgagaaaacgaaaatctatttgacaaagtggcactctggccagtttatcttgcaatatggctttagctcactgagtctattgatttccttaaattaatgtttacagaatgctactgaattttgctcaacagaacattgttctttcgaagctttatatatatatatatataaaagagatacagactgttattgccatgtgttcctttgtttagaccaaggaaacatagtttttaggtttttttttttcttaagacagccttgaactatagccacttcctacaagcatttacttttcacatatttaaacagcaaaacatgtaactagaaagtgggcccaaactgcatgggtattagacgaatctaatcctcagtgttcctgaaagctgaatgccacctggagcatcagagggagaaagcctttagtcctaagcccagatgttgctggagaaccttcctctgcctcatttggggtaactcggcaggcacccgaaagcaacttcacagccagtgctcctggatcctgctagtttttccaaacacaagcatcctaataaaattcaaacaccatttagctgtttgggaactctaaatataacatcttgccctttgaccacggtgctcagtgttcaatacacaaaacctaatctctaaagatgattttaaaactgaccttcccagagaagtacacgtatccattcagctacgaacagtgcagaaaacaggattttgactcataattatgaaatggccaaaataaaacttagggaacacaaagcaacttttctcaaccggttgactcagccaacaaactcacccaagcgaacctcctcagagcacctctcaaaacgatgctttgcagacatttattaatcacagtgaatgcttcccaggaattagggctcctctttaaaatctcaaacttgtaaaccaccttatatttggatgatattttatgcttcccaaagtgcattcatgttttcttttccatttgatcctcccctggaatgagagggcactggaatagaatctcaggattcactgtgtatagcatcctgcaccattccttctcttctggagggcctgttagtccccggctgtacacacaggataaatgcatgcatgactgcaaagggagacccttagtaaccacatcttgtgaccatattttacagctccatgattcctcttttcagcctctggcaggagagtttagtgtgagtgagacagtgaagaggagcagcaataacgtatctgttcttggcttttcatctgataatctctatgaggagttactaaagcatctgagtttatccatttaagtccactctgtctgcagtgtaagtccccagcttgtgccactgctgtcaggagatgagtctctccttgatcgatatttacttaacaaacagcagggatgggagagtttgtttagaggaatcatgtgcactctagggtgaatgaatgctcgggaaagtacttcaactatttgtctccttccctaagatttttgtgtacgtgtgtgtgcacacacgtgtgcagatgcccattctctttttaacttctccaaagacacttcgaagtcatctagaaaaatacctcgctatgtatgattggtacatcattataccgttaaggagctaatgatgcagatgcagtttttctaacccagcaaagtttggttcttcttttgtgctcttatatagagcacaaaagagactcttaggataaactaaatgcacaagcatctacctttgacccctttcagatgagtggaagggaagaaaatacggatggaaacaataaaagcagtttgacaaggcagctcttcactatgtatttttgatggcattacctatatatttttaaaggcccacagggacaaaaagtaactttctccaatttttcagagctgcttcagcattagatatatttaactctactactgtatatgaattccacggtgtgaaaattgagagagcactgttctttcgagttccctgaaacaattgcttgaaggctcaagtcagcctcttgaatgcagttgacttggaggcatctggggctagatcgaggggttttgtttctgggtgtggggagaggctggggggtggctggggagttatttatttatttgattttgtgaatcggagttgtaaaagccatctgaaatattcatgcagaatagtctgagaagcccgtttctgttttatttaccgcacagtagaacagccacagcggattagttctacaatacccgtaacaaaagcccaacagctgatgcatgtgatgttaggaggtgacaaaacagttaaagtatgctgctggctacaggcaagcagtcagcagatgcagacaaaagggtttgtgacaagaataactctctctccaaggcgagcagtgaagagtatccaaaataccagtacccttttctccttgacattgtcttcttacagtcagcattttattgcccttttatagtataaaaaaaaatggaggaggaagaagaaggaaaacccacacacaaactaattcaccaaaatactaggcaggattgtactttcccattcgctagccatgcctgccagtacacgtgtccttttccatttctccatcgaagcaagtttgaaaaaaaaaattagcttaaaagatcagctataaagatgatttcccttgaaaagtttgtaatctattgataggcttgataggccattggagcctttggttacgggttggggggtgggtggccagggaaagaagtcgatgcctggtttgttttctgtccatttcagtgaagatcatttcagtgatgaaatgaggccagagggccaatttttaaaggggattgaggagggaggagtgtccatggagaactgagcaaggggcaaggtttaggtcccccgcaagaggctgatgaatgagcttacggacggttcagaggtgtgaaaaatgagcttctctgtctccagaaaataggagaggctgtcttctttttaacctttgtaattccccttctattctctgtgacattcattcagctgccaagagcgtttggcaaggtttgggccagcgagcacacttccagtgaccgctaaccttggtatgtcctgacacttatgatgagtatctgcaggacacagaaggcaggcagcctgctatgtcaggcttttattatgtactgcagaggctagggacagtcagtttaataaaacaaatcatccttgaaggtaaagcaactgggaagaggaggaagacaggagaaaaatgtgtctttgccactcattccgatggaaaaaaaaaagaacagcaaaacaaccacccacccaacacaccgtgtgtgtgtgtgtgtgtgtgtgtgtgtgtgtgcgcgcgcgcgcattcgcgcacgcacacacacgcgcaacccagctgtggactgggcagacttgaaaacctcctctcattttctgcatttcatggaagcccagaaggctcttgtttgctctgaggagactcaagtctgtgatgaaattggtagaagctgatagccaacccccttcaaatttatgcatatcttcaagtacctcattactttatattcttctccaaatatcaaggcaagaccatctggggtgacgttcctatattgggatgcctttttatcaaaacaaagtttccactctcctctcctgaggaacgctgggcaaagcagctcccacaatagcctcagagttccagccaaagactttggaagccttttgttttttccctgtggcatgtccaaaggcagggccttctcccctcctccgcccgccctccccagccgcctgcattgtcttgcattccagtgacttgattgactgttaccacctgatgctgaggagatactctagggttcattctgcagattgttgggttctattaaaagaaacctagataagggattacttgtcactaagggattttctgcagatgtttattggtgatgggaaagccattaggtgtgaagaggtgcagaaaaatatggacaacatcattctgataagactggtttctaagatgctcccacaaaacatcagaaagtaccccctattattctgttaaatggagctgggtgttttcaagcagaggtaaaggtctctttttccatgggtgatgtttctatgtgtggatgaaattcactggaaccctctcagaagatcagttgctacccaaaagtgtacctctgggagccaccaaacacatgagttgctccagtagttcagtatctcattacaactttcttttgtccagtccagtccattgcatgagtatcacctcaaagtaagcactatattaactaatcattttatttgttcacaaagaattcatttcttcccaaatataaaccaataaccaaagtctcctccagggcatcttttataccatttccatttattttgaagttactagattctctgtggtttttcaagattacagaggcacagcttttcaaggttttggtgcctcatataaatagtagaaattgctgaaaaagcattaaaagggagccagcatcgtttaatgcaaagacaccttacctcacagtaatctcttcatctcatcatttcttcatctcatacaatctcatgctttcttcatctataaagtgatgatttctgagatctattcgaactctttgaattctaccttactttaccattattttaaacttctttttttttttttatttttgagatggggtctcactgtcacccaggctgtagtgcaatggtgcaacctcagctcactgcaacctccgccacctgggctcaagccatcctctcacctccacctcccagtagctgggaccacaggcatgtgccaccacacccagctaatttttttgcatttttggtagagacggggtttcatcatgttgctcaggctgaagcttccctttattaagtattgttaaagtattaagtaactgccactctagagcaatatggagtaaagcagaaggcaagatctcactatgagctatttaccaaataactttgcaaaagatactctgctgaggctccttatctagagacaccttatgatgaggtaattgaaagtacataaaagtagataaaaagttaaacagcatcaagacacaaatgcaaaaggtgataaaggataacctatgattgccaccacaagaaaggaatatttaaaacagattaaaacccactaaaaaccattaacaagcatgacgaactataaaaatgatgaagaggagactgcatacaacccccaaagaagttgccttgttctcatgcaaatcctacaactacacttccctccctcccctgctgctgatgttctagatgtacctcttctctctcctctgacagtcttgaacaatgcctgcccttcccctgtccctggttccccagacctcctgtgcagttcttggtgtgggcagggcttccggccttctctggcttctctggggcagctgcccacaccttcacccctcaaagctctctgccatgtcatgctgcatccctgagtgctcaaggaacatagaatttcactgaggctgtattgccgttggctgatgaaaccacccttcttgaaacgtttattttaataaatgcctataattggccaggtgcagtggctcacacctgtaatctcagcactttgggaggccaagacgggcagatcacctgaggttgggagttggagaccagcctggccaacatggtgaaaccccatctctactgaaaatacaaaagttagccaggcgtgatggcacttgcctgtaatctcagctactcaggaggctaaggcaggagagtctcatgaacccaggaggcagaggttgcagtgagccaggatcatgccactgcactccagcctgggtgacagagcaaaactccatctcaaataaataaattaataaatgcctatgattatgtttctgtagcatttggctaacagctcccaatccaaggagtgagagtgggcagttgctccgcttcactgttctccagccacattccctccctcagtgatgctcatttgatagaatgtggaggattatctttgggggtggaggtgactgtgctagaaaagattgcttcacgaatttttatttgtataatgtgagtgggagggctaagctctcctccaacaaatactcatgtatacaagacatttgggaggaaatcacccaaaggcctgtagaaaatccacatgaattctcagcagagaatggcccttgaggtgtatgggtttgcacattcatggcggacaaggcggcactttgaaggattttccaggcaacactgggaattatgtcctaagaaatgggccagtgtgaaagtctttaggagggtctgataaaaatgtaagcttaagactgattggccccaaaaggagtccctttcatttttttctgcagagttattacatttctttataaacaacaattaacttgccatagggaacaatgaacttctttgtccaattttaaacgtgaaaaacagtgatgtcgggtgatgattctggttttctttaccagttactactattgttaaaaagtacattgcacccaaggtgggaagaaagagatgaaacatgttcaacattacactacttcctttttactttggtacgtggcatgtctgaacttagatgaaatgtctttcatctcttgtatatgcgtagataaatatggctacatgtacacctatgatacgtttatgtcctcatacgtctgcacttaatgtaaaaatgaaactttactggtgtataagtaccccactaaaagaaatctactaagtgtcaatgtgtacttggaaaatcatgagttcatggattattctgtgattccattatgttggtgtggggatagatagaccatgctgtactataagtaacttccaaagaacactaaataagtacatcagtagctactgctttccttagtcaagagatcagattaataagtaattaagagaacacacacacacacacaacacacatacatattaattgctgtggaagaaaagccttaagaaattggggttctaaaatgaatatttggggaatgtttattttggatgataaggaccttgaggaatttccttaccctctctgagcctcagttttctattgtgtaactgggataataacaccccttagagagattgggagaactgaatgacataattcacattcagtacataaaacatagcctggcaagtagtaaatactcgaaaaaagttagtttgtattattattattatcagctgaataaatcactctcttatggagcaattctaatctcaaggttaagtagtttctgatgtaatattttaggatcagttttgtgacttcatgttaatattattattttactcctttatgtatatagaatactttatattgcagattaatatacaacttagcatctgagtcaacaatcctctgagacaaacagataactgagattttagaagattttcttcatttaaagcttgggtttaatttataaagaagcccaactatttgttattctattttgagaacgtattttgttttcatcatggcaatcaaaaagaaataggattcaaattctgaaaaaataattggagactttcttctggatagcacttatttaataaagtgaggaatcccaaaagtcacatcccatattcctatcctaatatccacaatgaaatcccagtttttcaataggtctgcgttggatctttcatacactcttcttaaaacaaagctgtcaaccccacatcacaatgcttctatatataatgactttacattaaaagaatagaagccagctatttttagaaaatgcaggtgccatgtaagcccctttctgcaagaatgatcttagctcagtttccttggaataactgtagacttgaaactgaaaactttattaatgccattgtctccttgtatcagcaggttccagagagattcctggaagttgctcagatcacattacgggagtttttcaatgccattatcgcaggcaaagatgttgatccttcctggaagaaggccatatacaaggtcatctgcaagctggatagtgaagtccctgagattttcaaatccccgaactgcctacaagagctgcttcatgagtagaaatttcaacaactctttttgaatgtatgaagagtagcagtcccctttggatgtccaagttatatgtgtctagattttgatttcatatatatgtgtatgggaggcatggatatgttatgaaatcagctggtaattcctcctcatcacgtttctctcattttcttttgttttccattgcaaggggatggttgttttctttctgcctttagtttgcttttgcccaaggcccttaacatttggacacttaaaatagggttaattttcagggaaaaagaatgttggcgtgtgtaaagtctctattagcaatgaagggaatttgttaacgatgcatccacttgattgatgacttattgcaaatggcggttggctgaggaaaacccatgacacagcacaactctacagacagtgatgtgtctcttgtttctactgctaagaaggtctgaaaatttaatgaaaccacttcatacatttaagtattttgtttggtttgaactcaatcagtagcttttccttacatgtttaaaaataattccaatgacagatgagcagctcacttttccaaagtaccccaaaaggccaaattaaaaaagaaaaataatcactctcaagccttgtctaagaaaagaggcaaactctgaaagtcgtaccagtttcttctggaggcaaagcaattttgcacaaaaccagctctctcaagatgagactagaaattcatacctggtcttgtagccacctctctaaacttgaaaataggttcttcttcataagtgagcttacatcattcttcataaagaaaaatcctataacttgttatcatttttgcttcagatactaaaaggcactaagtttccaatttacgctgctcaactttgtttatatgcttaaaaggattctgtttacttaacaattttttcccctaaaatactattttctgaatacttccttccagtaaggaataaaggaaagcccaacttggccataaaattcttgcctacactagaagtttgttgacagccattagctgacttgatcgtcatctcctaagaggaacacatatattttcacaagcaattccacactatcctgatgggtatgcaaagtggtgacagtctaactcagtgtttcttcattttaggtataacattttaaagcaattgataatgcctcttccaattcagaagctagtattgaccaaaatgtgagaagagtgtatagcataggaaaatttggggttaacccaaaagacacaattccagcacacataagaaagctagctgctattttatgctttcttccatggttctcctcttttttcccttttatttttccctgtttttcaatgatgtacagtgttccctacttgcattgaaaaaactcgtatggcattcacactttttttcttaggtgggtttttgtgtccagatgcagtaagaattcattgttcatcctaaaactgttttccagacccttccttccccttaggtaatttgatatacacctcctaaaatgacacagtaacaaatctggtatttagaacatatagaacataaatgccattttttaattcaactttaataagaattacatttgactttggagaatacaggtcttgacccatgtgactgactagctgacccgatcgctgtaatttaacgtcatttataaattctgctgatggacaggaatgtatgaactcaattattgtcagcacaaagccttaaaacctgctgactttaaattaaatggtgcagtcctatgatgccctgcaccatccaggggactaacagggcctcgcagtgtagacagagggtgcagccacacgggcgggggcaccagccacctcactctgcacccgcggcctcacacatctcccagctcacactctactaatgcacagagtcattagatccaatttgttatttttctcacttgctttaaaaaaaagcagtttggataatcatgacattggaataaagtgggaaggaaaaattccatcagcacaaaatagggaagtaatcccaacttgtagtcacagttttctgactggctttgttttaaaagaggatggcagtccttgttcgtgtcagtgtgccactgggtttttgctgttccgtgtaattcatatcaactttgtgttgccatttgcaaggtaaaaggcaaagctgtagtgtattcacctatgtagacagattgctagatatctttttgatctggggcgagttcaatattgattccagacttatttggatttttttagtattattttcccctccctttctaatttaaatagacaaattaagcaaaagtgtgtgttcacaaccaaatgttgatgcccttatctactgataatatcctctcaatgttcactgaggcatagaaattatttcagagtagaaattgcagcatgaggataaactcacctctttgttctgaaaatagaactttatcactatgctttccggtggttttcccttttacaatcgaaatcttgtgcctcccaagtgcattggaaaatgacaaaagcctgtctctccaaattcctatttaacagtttgattttttttttttaatcaccatctttcaaatcttagctcaactctcaccaagtgaaaattggctacttgggagaaagttaactttctatggtgggatggtgaaggatgagggacagtttacataggaaaagaaaaaaaaaagtctaaagtccatgttgaaaaaccacactaccacttattttctgctaaccctaaattatttttgcgtatacgcttgaggttatagtctgtgcctagacctaaaatgcaccagcgggggggattttaaaaaatccttcaaaataccagttttttcccaacaagtacaattgttcttgtgccttctgtggctttcgatttcatctttttgactttatttccaattactacagctgcaataaacactagattttttttctggctgtttgacataacgttgatagctatgcatattttgtgtctttttaaaacaaagcgggagaatacgtttttgaagaagagaatttttagaacagtttgataccgcaaattattttttcctcaattgtttgagcagcattcgagttttgaaaattcttgtagaagccaattttttgtaactgtggtgcaaatcttgtgttttcttagcctaatgaaaagtagtatagaagcaatatttcataccatgtgctatatatgtgtgcgcagatgtgtgaacataaaatcacatacacacatatacacacatgtaaaaatatacatatatatatatgcgtgtgaagtggaaagcttaccttttcctatctagatttaagaacctattttagacatttgttatgttttgtgaaaagaatgttctatttgcaacaaaacatttaattcttactgtatctctggctgtttaatgaggacgtttcacattaaatggtaaaacacatggaagatgttagaatgtagtaattatttaagtaaacgttcacccacatattcctgaagtttgctttgtgcctccgagtattatttaattaaagaagtgttttatgtttgcagaatctttgtcactgtactagggatgtgggtgaatatcatttaaaaaaatttaaaacaacaaaaaaaaagcaaaacagaaacactaaagcaagaggggaacttttataaagcaatgtaaatatttaacctcatggctgtcattatgtaagacatgagattttaataaataactacattctcacgacatctgttgaatttactaggaacactacagtgactgtatagacagttgaaagcattcttgaaaatcctgctctctccttttaaaagttaacaatctcttttatcagatgtcaagggcaagggtaatgcagtttctgtaaatttatgaaatttctttttctatgtacatgaagacatttagtaagtaacacccccccttcccatgcgcacatgtgcgcatacacacacacacacacacacacacacacacaaacacacacactgtcataaagctaatgatttggggactttaaaaaataggatgtcctccaggaacaatcataaatttatgaaagaaagagtagtttacagactcccctgaaagaagcagtgtatatgtgaagacagtgcaaaaatctctttgccatgtatattatagcgtattcattggtgtgaatagtacaaatgtttccttctggtacaaactctgtgtttgcaaatttacaagaagcattgttttcaaaaagctccccttaaaaaatgtaactggtttatatgagtaagcagttaccgtattgcacttaaatgttatgttgaaggaaatgcagttttgttttctgtagatctgttggttgtaaaccatctataaaactaaagctaaaatgctcatattcagagctgggatcaaaactggtatttaacctttgcatcttcttataattatccttctaagaatataacagaatgtggaagtgtctggactttgagtcttttcaactgagccttctctcaaatctgacaccccctcagaatgcacaaacataagcagaaaaggcaaacaagcttaccttcttttgtgaaaacgtattcattctgtatttttttaaatattcaattcccctaaaaatggggagaaaatattttaaaattgtatattacgacttcaaatttagaactaagaaaaaaatgtatttgggattggtctcagcgctacctagaagaatcaaaggtcatggcttccctcaatattgtcccagccatttctcatatgtatatagtataaaccgtgacaaaacactgcctttatattatttagcaatatgttgtaaatagcattattaagctcttttttgtaataaagaccctttgatttgaatatagtacaataactgaactgataaagtcaatttttgatttttgtttgttttttttagctagaggcaatttcaattgtgaatttttgttgttgtctattgttctgaagactttgcataatttattggtttaatttatcctaatttatttgatgaaggtgtacaattttgtattaccaaggatgtactgtaatattaattgatatgataaacacaatgagactccctgtccatattaaaaagaaaataaaaaggtgcagtagacaattgattttaaaggaaaagttaaaaaaattagtttggcagctactaaattttaaaacaggaaaaaaaaaagttgttgtggggagggtgggaaaggggttttactttgtgtgttttaagcttttgtatactctccaaacttttaccttttgctttgtaccacttaaaggatacagtagtccaattgccttgtgtgccttccatctcctcttaaactgaatgtatgtgcagtatatatgcaagcttgtgcaaaataaaatatacattacaagctcagtgccgtttgattttcttaaagaaagagtgacttttaatttttggacctgtatccaattgtaggacagtaggctagttgtgccagtaatgtcaagtatggagattttctttcactacaattcttcattctgttagcctaacgtgcagctcctagaaacaacctcttttactttagatgcttggaataattgcttggatttctctctctgaaacatctttcaggcttaactttatttagccctgaaacttaaaaaaaa

SEQ ID NO: 296 - DNA, 173896 bp, Homo sapiens
agatgaaagggccgcggcgcgacggccgggggagccgagctgagcctgcgacccacaaagccgccgccgccgccgccgtgatggggctgtgaggcgtccgcccgcgttcggtcctcagccggcccgcgactatgcccggccgcgcccgccctccgcgccctcccgccgcaggaccatgaggccgcgctcgggcgggcgcccaggggccacgggccgccgccgccgccgcctgcgccgccgcccccgcggcctccggtgcagccgcctgccgccgccgccgccgctgccgctgctgctcgggctgctgctggcggccgcggggcccggcgcggcgcgggccaaggagacggcgttcgtggaggtggtgctgttcgagtcgagcccaagcggcgattacaccacctacaccaccggcctcacgggccgcttctcgcgggccggggccacgctcagcgccgagggcgagatcgtgcaggtagctgcccgccgcccgggccccgcgccgcctccgccacaagatggctccgggggctgcgcccgccgaccccgccgcgggctgcctgactggcgggcgggcgggaggggtggccgagaggccggcggcatccctcccctgcgggcgggcaggcgggcgggacgcggcctccggggcgcatccgcggggggcgagcgcacgtgggggctagagctcctgtgaaccccggggcgggaggggcatcctgggcccggcacccatgctggggcagcccccttggccggttgggtatttaggtctgcctcaggtggaagtcccgggaactacctgttgaatgccaactttgaaaagacaagtgatgagggatggggtggctcgtttcaggttgcaggctttgcttttccatccatgcatgttctttttgggtgcggccaggtttgtctgaagggctgcacaacgtcgggttcttccccggaacctgccgtccgcctcacctgggcgccggtgacccttctgcggggctctggacaagcagcagcaggcaggggaggaggcggagctggtcgaggagtggggatcgggggttccctggagtggcgatggaaggcagccctcgctgcatgcttcacattacagagggtgggagggataccgcctgcccgtccctcggccaaagactgatgcgaaggacctgcaaatggggagatggcgtatctcactgacaggacctccaccttggaccaaatgaaagagatctacattccaaaggaaactggctagggagacctttaagccgtgcctactctttggaggagggactctcaactgaagcttctgcggatggttagctgggtggatgtcttcccgcttccttggccgtgattttatcaacttgttactagacagccagcgcactaataatggcagttaatatgcgcgcctcggatgggggcgattcgtaaaggttggcttgtctttgaatctttggggtgatcggatgtctgcagggcctaagctttgtgggccttctgtgctttactcttgggtgagttatgaatgaaaagaaggggactccatggaatgattgcatagcagcccgcagcgtagacagcctgttccgtggtgtccttttccttccttgggtgcagactcaaagccctgccttcataggacagggagagctgtgcagcttgactccgtagaggtgtgcccttacaaagctggaggaggtacccaggcccatgcgattaatcagcagcattgccttaccgggctcttatccccatccgaaaacttctgtagggtaaatagaagaggaaactccttcattgagccctttgactatctatgttaatgcttttggacttaaaaaaagttgtaattatgatctttataagttttagagatgatgctttgctgaagattcctaaacatttaagtcttgctccttggcaacttcttgtctttctttgaggctttcattgtgtcctgatggttttagaaatgtttgatttacagccttctaaaaaaaaaaaaaaaaaaaaaaaagacgctctagcgtggcacttgactttttgaaggagacttttgaagtttgcagtttttatctgcaatgttttaacgtgtcactctttctcaacagtagtttgtctggtgagcgagctatccattatgaggagtgttatgctttggagataatcttgggttcaccatttaatacaaaattagcagtttaaacaccatttgtaactattttatccttgtgagtagagagataatatgtgaatttggcagaaggaatctattctcttctgaaactttttgaagtgcttatctaactcttttgtagtccattagcctagccaaaaaaaaaaaaaagtcaatagttgctaagtaaagtgacttaaatggtatttaataagtttacttgttaagcaatcactaataggtgtccttaattcccttatagctgcagtaatgttggtgagtttatctgagctgtctgaatagtcatttcatggtgcacctcgtatctttagtaactttattgtggtagctgacttgttgaacctccctgtttctgcggacagagtgcagtgtggctttcagggatgtgtgtgtacaaaggctagcatgcttttatgagttctgcaaatactgtttgattgaaggaattggtgtggaccttgtctggcagccctgaaaaagttttttgtaaggaaggctgatgatgttttagggccgctgagagggaatataacattttcttttggtgagaaatgagaaagcagaaggaataaattgctgtccagctttggattaatcatgttttctaagtaacctgaacttttcaaaacctccttttatttactgtctttaaataaacctccttttgtttactatcttgaaaaacctttataagctttagagatgatgctatgctgaagattcccaaacattttatccacagtcttcaagaatagtttgaatcttaactcttgctcattgtaacttcttgtctttctttgaggctttcactgtgccctggtgacacagtctcattgaacttttcaaaacttccttttatttactatcttaaaagaaaatagtagccaggcatggtgactgacgcctgtagtctcagcattttgggaggctgaggcaggaggattgcttgagcctaggagttcgagaccagcctgggcaacacagttagacctggtctctacaaaaaaaaaaagtagcccagtatggtggtgtgcacctgtagtcccagctatttgggaggctgaggtgggaggattgcttgagcctgggaggctgaggttgcagtgagccatgattacaccactgtactccagcctggacaacagagcgagacactctctcaaaaacaaacaaacaaacaaaaactgtgatttgctgcttagtgttttatcgtctcagagcagagttcattttcctataactaaagctaaatagtagcactatagcattgcttttgttatttccactggggttctgtagcagttttatttattcatggtttaggggagaaaaaacctgtttaggagtgtcacctttaagaattctaagataaggaattcgtttgtattactgatttttaacccccctccttattatatgccaacgaagagagagagagagagtgtgtgtgtgtgtgtgtgtgtgtgtgtgtgtgtgtatacatatatttgtatagtagataccttatcatagtctggtttgcctagataattctaactagagtacctgttcagtcatttccatgggttagggtaggggaagcctagttaagaattgtgtcagtttgtcagtgtcagagagagagagagagtgcaagagggagggaggtagtaattcaaaccttaggattcgtcatcaggaatcttggttcttctcctttgcgttttaggcttaaataactatcccaaggtcaccaatgtaatctgaatgaagaattttttttttaatgtctccatctgtgaaagttgtggtgaaaacaatttgtgggtatgaaatgctattagttacttttattatcttatgtatttatgcagtattaaagcctgtttgcttgtaagagtgtcaggcatacagtttgaatgctggagaaattaattacacttctcctgtagttctgaagtgtgggactttaaagggttcttagatatattgatacatatttcatctttgaaccaatttgttgctgttaatgagatcattatctgaaactttcagacttggctgtgcaactcacatggttggtgatgttaaataaaggcccgattaaacaccggctagtggtatgtggattggttaaacaaagaaaatttgcattgctagagatgaaagattgttttaaagtcgaaatgcattttttttttgcttgaagtcaaatatttagaaaagcttgagaaattcatttgtagaaggaatctgaatgacaggttctgtgtaactttaaattcagcctttctgggtcctaggttaaatgctgaatggacttgaaaacagagagaagctgaggacatttaagaactaagtcagttcctttagctattaggggtgggtagagagctgggtggtgggttaaaagggctgatcaaggtccttaaatatccgatgttaagtaaaggtatcacagagagtaattttaggaaactaattcctctgctttgtttccctgtcagtgtgcttctgcagtttagcatttgatcaaacactttcttttcatctccattttaagttaacttaacaggcctgcctctaaaaattgacttggtctaatagaacaattgtgtgctgacagctgacctggatttagacagaaagggattgcctactgtcttctcagatgggccttcataggttaaaaccaagcatttgattcagggggaaaactggggctgtattttgtgatgttatacattcttagagccccttattttctattttgttccctgagatctcatgggagttactagtacaattctgaataggaatgaaattggagttcagtgtagagctgtagattaaagggaaagtagtgatggtttcctcttatttatacagagcactgccaagcatgtcatgttttggttcttctcatcctgacactaacatgcaattagcaactattgttaatccattttacagaggagaaaaactgaggctgagagaagcaagttgagttctctaacttcacatggctagcagatgacaaacctggattgaaacccaggtctggccgggcgcggtggctcacgcctgtaatcccagcactttgggaggtcgaggcgggtggatcacaaggtcaggagttcgagaccagcctggccaatatggtgaaaccatacaaaaaaaatacaaaaaaaattagccaggtgtggtggcacatgcctgtaatcccagctactcaggaggctgaggcaggagaattgcttgaatccgggaggcggaggttgcagtgagctgagatcacaccactgcactccggcttgggtgacagagcgagaccccgtctcaaaaaaaaaagaaacccaggtctgcctgggttgcttgttcttgtttttgccaagtgaacagaacttggctggttaggattttgacattaattcaagtctaattttgaacaacatataatataggggttcttaacctgagggtcacagactttcagagatagtccatgaactcctgcaagtgtatgcgtattcttgtctatgggcagttacaactttgcctcttccagggttctgtgatgtgtcccctctatacccacaaggaaaaggggaaactctaatctagtagagcattgaataatccattaccaagagtttgagtggggttcaggctgacaagagttgtacggaagtctacaggtctgggtgcctccattgaacatatttattttgtagacatctatcacagccctattctgtaccagacactgtattgctgttgtcttctggagttcagtctcctatggagacagacacatgcatggataaatgataattcttaccaaatgggtttctccaccgaactgagcccttaggccctgaggcatccattgtctataatgaattaacttccctcctgtgcactgcgcagcatccttgggagaagagagaatatagtcactcaaagacttttctgcatttacatggcaaagtgtaagaacttgacactctgaatgcaggatgtgggaaagcagagtatagttccgtttcatagttcattgaaaaatgaaacggagcacctgtcgctgttgaaatgcctgaagagtagcttctcacaccttcccttgtggacctggaccccatggggtctgtttttgctcatttctggatcgaccccctgggttcccactgcctgctatgcatgaggcactcagtattgaatgaataaatgatggagagtggacatcaggcaggcagtgggttttatggattatttatgctttaattgatgagaacaacttgctttggcttggctaataaattctgggattatccttcctttttgattgttatttccagaaacttgcttggatggaaaggatagctctctctctggttcccatagacccactggtattacaatactgggttgtatgaaagtgatctggcccggtgtggtggctcacgcctgtaatcccaacactttgggaagccgaggcgggcagatcacaaggtcaggagatcgagacaatcctggctgacacggtgaaaccctgtctctaccaaaaatataaaaaattagccgggcgtggtggcgggggcctgtagtcccagctactggggagactgaggcaggagaatggcgtgaacccaggaggtggaggttacagtaagccgagatcacgccactgcactccagcctgagcgacagagcaagactccgtctcaaaataaaaaaaataaaaagaaatctgtgtggggtgtttatattccaaggcagggtacctggcataagaaaagtctgaaggtgttcttttcctgatgaaactgagtattgacaaagccttaaagtggataggttatggaaggaaagaatcttgaatttccagtgtccctgggagtaacaataagggattggcattcagtatcatcgttaacctaaatatatgccatgtgaaaaactttgctgcttgcttgctttctctctctctctctttttttttttgtcagggtctcaccatgttgcccaggctagagcacagtggtaagatcatggctcagtgtactcttggactcctgggctcaggcagttctcaggcctcagcttccccagttgctagaattacaggtgtatgccaccataccgagctaattttttattttttgtaggtatagggtctcgttatgttgcctaggccggtcttgcactcctggcctcaagtgatcctcctgccttggcctcccagtgctctgggattacaggtgagagccaccatatctggtcagaactttgcttcttgatggtattttcccaagtctggagagtttggatttctaatttgtgacatttaagtaaatcttcataatcaaaagaaccagattcagtcctttaatgtgttagaaaggagactgaaatccagagaaatgctttgctgaagtccacataaggtagagatgacccaggattaatatttgggtcccctgactcccaggcttggagcccttctgttacccccggctgtagcctggctgagtgtgacaggggacaccagatgcagggcatgctttatgatcagatgtataattgaggaaagccaggcattcttaaattgtatattgggtttaagtggttgcttttcttctctaattaatttagattttgagtctctcagtcttcctccctgtcagagcttttaaaaatagctactaatgatcaagtgcttattgtgtgccaggcactgggcacagtgctttgctcacatttaacagacaaggtagatggcatgtgccagagaggtaaagtcacttgtcaaagtcactgagcaagtcattagtgcagctgaggttcaaatcctggtctgtctgattctaagccatttctgttttcacaagcccgcttcacttcacactttcttatgatgaggttatgggaactgatgtggaatttagagttgagtttaaacccaaaacgattgaccaagaaataagtctataacgtcaactgagaaaatcccctatcctcacaaagatgtatttccttcctttcttttcctcttctttttttaaatcacaaaagtctcattctaacttagttttttccataaagagccaatctaccaggttcacaaagagggaccagtgacttgacatatataactgtcactcgatggcacttctgttgttttcagctattgggcaagctggaatggctgtagttttctggcatttaaagggatttctggtgtgagacacacctccttcctgtggctgacttttatagcaatttgggagtctgcatgtctttctccaaagaggtcacgtcccatgtttgtgacctttcttactttgcacaggctcattgaatcctcttggttgttaaaacttaccacgagtgctacatgcctcagtgggcaaacattcagtggtgccccccgtccatcagatcctttgtggggcaaggcaatgaacacaagagtaagacttggtccctgcctgcaggcagctgagtgtaggtgtccagacagcacacgaacggttaccttacagtacagtggggcatgtcctatctggtaggaaacagcctataggatactgaagaacacctgggggagggaatcgggccctggtgctaagtttagacctgtctgtcactgtatgagcattctggccttttccaactcatttttacctacctttgaggttaaagctgataacctctttgaagagaggtgcctttatacctttctaacggaataggaaggaggtagagagtagaggttctttgttctatttgtagcttgaatgagatgttttaaaatctgactttcagtggctctgtttactcatgatagtgtcaaaagaataaggtcagctggcccattgtggttcaaaggagagcactttatttttattgcccttaagatgtgttgtaagacttgatattaatttcctcctctccccagcagccagtgtaatatagttgtttagaaactcagtatagagtttgattctgtgaaaacgaagtttgatcctagaattttgatgggaaaacgtatgttagaatggggacttctggcctcctggtgcagaagtgcctgcatttaaaaaataaaagagccggcgcggtggctcatgcctgtaatcccagcactttgggaggctgaggcgggcagatcacgaggtcaggagatcgagaccaccctgactaacacagtgaaaccccgtctctactaaagatacaaaaaattagccaggcgtggtggcgggcgcctgtagtcccagctactcgggaggctgaggcaggagaatggtgtgaacccggcaggtggagcttgcagtgagccgagatcacaccactgcactccagcctgagcgactgagcgagactctgtctcaaaaaaaataaaaaaataaaaaataaaattaagagtggggtagtactcaattaggtgtgtgtaagttcccatccagcactgtaagaattttattataacttaattttctacttgagttaatttggctttgctatcttgtcagcaaacatttattgaatgtttactgtagataccgtatagagaagaaacatcggttttatgcacccgtggtataatttgtgcttttcaaatgttatttttctgatttattcgagagtttgaggctgcagtgagccttgcagctaccagtgtgagccaccgtgccagcattggtaattttctttctttctttttcttttttttttttttcgagacaagttctggctctatcgcccaggctggagtgcagtggcgtgatcttggctccctgcaacctctgcctcctgggctcaagccatcctcccacctcagtctcccgagtagctgggactacaggtgcacatcaccacatccagctaatgtttgtattttctgtagagatggggtttccccatgttgctcaggctggtcttgaacttgggagctcaagcaattcacccgccttggcctcccaaagtgctgggattataggcgtgagccactgtgcccggcctgccttggttattttcataagatttctagaattaggttcactgagttaagtgatataaacatttttgaggcttttgctacatatttttagattgctctacaggagtggtctagtttatacacccctaccaggtcgccatgtatgtttctacacaatagccctgctcgcaacagatagtatattttgctctgttgcccaggctggagtgcagtggcgcaatctttcttggctcactgcagcttgaaatctcaggctcacaagtgatccttccgcctcagcctcccaagtaactgggactacaggcatgcaccaccatgcctggctaatttttttttttttttgtagagatgggtttttgccatattgccaaggttggtctcaaactccagggctcaagtgatccacccaccttggtctcccaaagtgctgagactataggcgtgagccactgtgacccactgtatgtttctcaaaaatacaaaatgtcgtaaaagtgaaagtctatatattcctatcatttagtaaatagtaaaatactggctttttttttttttttgtctgccataaggatctgaattatgactaatgtctgcactgaagggaaggtacctggcgtggcatctgggtgcctcccttgtaggtgtatcagagcatgattcaggagcagcaggttgcccttgtattctgggcaggaacacggcgtctgtccaggcagatggccatgctcagaggcctcacggtggggaccgctgtgctgtcgtcacaccctgtggcagcagattgttgcccaggagggtgctgcttcagttgctggtttctgcccttcctctttcctgtcgagcaggctttctgcttctgaacaggctggattcagaaaggccgaatgaatctgtccttgaattcatagtgacactgtcagttggtggtgggcagagatgcaagttgagcccaagcaccagactctcaggggtgcatttaagcagcaagcatataggctgaaaacagcttccaggtattttgttcgatcgctgttaaaaatctagaaagtgtacataaaaatgggctcttctaaaaaaaaaattaaaagatctggcatcagtgggtccacagtcccatgaggcaatagcctgccatagtggagtggcagctgccccccttcagcaggtacacaggccctccagtcacaagtccttatcgcattgcccagcttacttccctcactgacagttccatttacagatgcctggccctgtagacactgtagctggccatcctttctgtctctggaagttccaaagttgaaagcttttaacttgtgcttggcaagtctcttttctctccttccccaaccaacctgagtgtgagatgtccatcagtggaccccatgagtctcaagttatgctactgaggaaggcccagctacccttgatgtgaccagagggctctttttgctttggtgtaggtgttgaaggctgaagtctggagccattggcctgtgccttcaggatctttgctccttctctctttttggctccatggtttctcaactctgagacttaattgtttgtgctgaagggcaccttgaaaatgctgtgactccggccgggcacggtggctcacgcctgtaatcccagcactttgggaggctgaggcgggtggatcacgaggtcaggagatcgagaccacgatgaaaccccgtctctactaaaaatacaaaaaattagccaggcgcagtggcgggtgcctgtagtcccagctactcgggaggctgaggcaggagaatggcatgaacctgggtggcggagcttacagtgagccgagattgcgccactgcactccagcctgggcgacagagcgagactccgtctcaaaaaaaaagaaaatgctgtgacttagctctccttttgcagtgagggaactgtgggcaagggcatctagcctttggtcttaagagctgggattagaactcagaacttggggttctcgggggaggggtggtctttctagaatggcattctgctgcgatggttgaattccagaaaatcttccatgtgcctgttgctttagggttcctggtgtactttcacttacagtatcttagttcatcctctcatttgggagtgccttttctggattctgccccagaaggctgtctgctgttcaggtggtctgaggcggagtcttgctctgtcggccaggctggagtgcagtggagtgatcttggctcactgcaacctccccatcctgggttcaagcgattctcctgcttcagcctcccgagtaggtgggattacaggcgtccaccatcacgcccggctaatttttatttttatttatttttatttttatctttttgagacggagtctcgctctgtcggccaggctggagtgcagtggcgcgatcttggctcactgcaacctccgcctcccgggttcaagcgattctcctgcctcagcctcccgagtagctgggactacaggcgtgtgccaccacgcctggctaatttttgtatttttagtagagacagggtttcaccatgttggccaggatggtctcgatctcttgacctcgtgatccgcccgcctcggcctcccaaagtgctgggcttacaggtgtgagccaccacgcctggcccctatatttttagtagagacagggtttcgccatgttggccaggctggtctcaaactcctgacctcaagtgatctgtctgcctcagcctcccaaagtgttgggattacaggcgtgagccactgtgcccggcctgagaatgcttttctttgtacctaatttgtatacttttctttaaatgcatttgacattgtgtgtttagcacctttatgggatttctggaatatcgctgggtacctggagacttggcatcttttcagaaagtacatcagtcttggagtaggtggtgagcagacagctaatggcatgtaaagaatgttgcaagcttgacttgcaaagctatttcaaaatttaaataaaggtagcttgtggctgagttgaagggaaatggtggtatcttcaagacaatgcttggcttgctctgcctcttgctgacttccctcttcaggcctgatgctgcccaagctgtttccctgtctctcattctctctcttttggtttttctttttctttgtttttaaaagagaccaagtctcactatgttgcctagactggacttgaactcttgggctcaagcgatccttccgtctcagccttccgagtagctgggactatgcaggcatgtgccactgcagtcggctctcacattctctttcttcccatcagttcttcccttcccttcagattcatccttctaaagtagtgtttggtcacatcagtctcttgatcaaaatctttcgtggcgtcctgttgcttactactgagctgtgtgaagaggtgacctagctgccccagtctctcattgttgcctccgggcgtgggcctgtgtgttgctgtccttgttcctgagtgggtcctgggctttcctctctcagtgcttttctttcttttttagggggatcggggagacagaatctcactctgtcacccacccaggctggagtacagtgacgtgatctccgttcactgcaaactctgcctcacgggcttaagcagccctcctgccttagcctcttgagtagctgggaccacagaaatgcgccaccacgccctgctaatttttgtatttttagtagagacatggtttcaccatgttgcccaggctagtcttgaactcctgagctcaagcaatccacctgcctcaactcccaaagtgctgggattactggcgtgagccaccgcacctggcctgtgcctttccttttggattgcctgctgtaatacgtgtcttcacctccacattttcaactcccgtctttgctttccactgtctttttcctgtcctagctcctcccatctgcagccaaactttcagtccttcccatgaagctttttcctgggttccaccagtgtgttcctttgaatcagagcactccatctccctattgtcttggatgtaaaacatgtaaattatttaccgaaccggaattctcctagatcacactactttgggatagcatagtgagagggatgtgaaaggggtgttaatgtggcctgcagaaaaaaaggcttggctttttttctctttttttaggtggggtctcactctgtcacccaggttggagtgcagtggcacgatctcatctcactgcaacctccgcctcctagtctcaaacgatcctcccacctgagcctcctgagtagctggctgggaccacaggcacacaccaccacgcctggctaattttttgtatttttcgtagagagggggttttgctgtgttacccaggctgctcttggactcctaagctcgggtgatctatgcacctcggcctcccaaagtgctgggattacaggcgtgagccactgtgcccagccaagacttgtttttttgagggagaattttctgtgattgtcgcaactatttgcaagcagctttcagacatggtgtgtcctgattattccaaatagttgggatagtccagactctcaaaataatttcaccttgcctgtgcttcctggaggtctggagaaaggagacagtaggaggtgacaccctctggctccttccagtctggcgtgtgcctgccctgggaacattgttcagaacatgctggagaagagaatatcacagcctgactgtagacttttggggatgtgttttatttaaatatgtaaaatataatattttggtgtcacttaaaacaccgggacttttggaggcgtagtagaagttctatgtagcttcagaatgacccatcagaaacaaatgtatatgagtctttacttacatttgtgccatattgcttccccctatatttttttccctttggaagctctggcatgggccttgatcctgtgtttaagcgctgtgtgggaagcagaatttaaaaggactgtagtagtatttctaaagagacttaacaggctacatgtgagagaattttagatttcaatttagcaaacgtttgattttctagtctttatggggctgactgtaagcatttgggaaattattgaattattgcttagttctgtataagttgacatgctgaggttttttttttttttttttttttttaactgtttttgtgggacagtggtgattacatgggcattgggactttcaggaatattccagaatctatgatatgttgtatttcacttgtgctagagggttttcaggctgccttttcatggcatgttcactccagaaatgctctaatgcccatcaataaatgtcaccctcatcctaggaattagatgaagagattatagttttgaagttttggtgttattaggcttaaatctctaggacacatataaacacacttgtggtattaaatgtgccgggtgggtgatttcaagttccagtggcagtggtaatttttgcatttcctgactcttgtgtttaaatttgcagtctcaacattgcatcactgtaagttttcacatttaatgaatatttatgttgagccaagttctatacgaatgtggtggtttctgacttgattatagcttgctgtgtactgtggccaggagtgccctacagacaacagagttggcacacgtctcagcatgccaagccccggcggatgtggttagggaccacggtgactggggcattggttgccataccaaccttgtttttggaagggaaagctctgaaacagcaatgggatgggggcagaatagttttgaatattccaagtaaacttattccctatatgttccctgcaagaagatgctatagaaaactataattcttactatgtgctcagatagcatgagttaattttctttcttttcttctttctttctttcttttttttttttttttaagacagtctcattctgtcacccaggctaaagtgcagtggtatgatcttggctcactttagcctcgacctcctaggctcaaacgatcctcccacctcagcctcccaagtagctgggaccacaggcgtgcaccaccatgcccagctaattttgtttatgttttctagagatgaagtctcagtgtgttgcccaggctagtctcgaactcttgggctcaagcaatagttagtttacttttgcaaggctgttttaattgtccttttgcaaaggtgtggaagttatatggtgggcctttcatgtgtgaatttcttccctacttgttggagggtaaacaggggatcttctatctcttcctattacagaccttcttctctcaactcctgccaacctcccttgccctctggtaactaacctagtgatgactgattgggggagggagaagggaaagaaaaacaggaaggataaatgggggactcctcctcccccagctccttatttatattcctcactttcccttataccaagatggggtttccttgctcctccctattgtatataagcaaagatcacagtcgaaggtgccatcacccataagtgggatgttagggtgccctgctcacgagcttcggcagacagaactgggatgagaggaaggaaacatccctggcatctcacactggaatgctgttacctctttgcaaatggtgccttgcatgattaattctatggtacttggtattgtgcagtaaaatgtctggaagggaattgatcaagtctggtaagccagatcagagcccagaatggcagagtgggatgtgacttgcaggtggcatctgctgttctagtgcctctttacagaagatgatccaagtctctggaagctgccacctgtccaggttcaacagctcaggcagtctgttgttgtggagggcttgtcctcaagcctcatcacacaaaaaaagtaaaaaccccacccctttgaaaagaaacttactgtttcagaagagggaggcagtccaatgatttaatctttgcttgctgacttggagccaactccccattagattgtaacctccttccgggcagggttggtgtttcaatctatttaacatttttcagctgggtgcggtggcttacacctataataccagctttaggaggctgaggtgggatgatcgcttgaggccaggagtttaagaccagcttgggcgacatagcgagactgttcctacaacaaattttttttaaaaaaattagccaggtatggtggtgcacatctgtagtcttagccacttgggaggctgaggtgataggatcacttgagccctggaggttgaggctgcagtgagctgtggtagtgccactgcattccagcctgggtgacacagcgagacctgtctctacaaaaataaataaataaataaataatttttttttaaatgcagaaaacatttcccagttcaactcaaagagcctctttgtttgaatttggaagagctgtcccttcctgaagatacctgaattctattttctgctcatcggtcataatgtgaatctaggatgagcacagatgtgaacggcacctcctagagttgtgcggtgcataaggccaacgcccagaaggcactcttccatctccctgttggctgacgtggcacctgagttgttcccccttctctaatgcttctccttcagcaattgtgatttgctgcttctgatttctgtagtcctaggaaaccagggaaccatgtttgttagaattatgtgtaaagttaggggacagagacatcaagggggtgtgtaagtagtttagtatgtggctgctttggctgcttttctgctttttgctggctcctctttagagatcagctgactggcgcatggagtcctcaaattttgggggcatgtaataaatgatggatggacctttttttttttttttttttttgagacagagtcttgctctctcactcagactagagtgtgtagtggcacgatctcggctcactgcaacctctgcctcctgggttcaagcgattctcctgcttcagtctcctgagtagccacgattacacgtgcgcaataccacgcctggctaattttttgtatttttagtagagatggggttttgccatgttgcccaggctagtggctaggcgttttatggtgcagaaatggcaccactattttgtgagtattcctaatcaccaacttttaagttaactttttttttttttttttttttggagatggagtctccgtctgttacccaggctggagtgcagtggcatgatcttggctcactgcaacctccgcctccagggctcaagcaattctcctgcctcagcctcctgagtagctgggattacaggtgtgcaccaccatgcccagtgaatgtgtgtatttttagtagagatggggttttaccatgttggccaggctggtcttgaactcctgacctcaggtgatccacctgccttggcctcccaaagtgctgggattacaggtgtgagccaccgcgcttggcaagttaactttcattcacctggtttgggtataagttctctttagttcttcaaactacaacttttagctgactgtatttaagaggagttgggaggacagagcagtagttttccactttgctacgcagacacccagcatttgccaggccttttttttttctttttttgagatgggatctcactctgttgcccaggcaggagtgcagtggtgtgatcttggttcgctacgaactccctgtcctgcgctcaaatgatcctcccaccttagcctcctgagtagctgggactacaggcgccctgctgatttttgtatttttcaccaggttctttaagcatgttgtaaactttgcagaacaaattggttctgggtttcctttgatgggagaggctgcagagtgctgagtctggagccagacagcttgggtttgaatcctggctttggcagttacctgctgtggaaagatggctttgcctctctggatctcagtttctgcatctgtaaaatggagataaacttttcctagcgttgttatgaggattacatgagttactcacagcatgcaatttatatttagtggggatgaggttgaagaaaatacataatttcatgctgctcctcacatatacctaacgtttatgttgcagttcccaagtggttgcaaattcttattctaaaatggtagcttatcaaagttaaaggaatccaaaaatgccatttactgagaagagaagtggtcataacataggaatttttttttttaacatgcttagtgcctttctacttgcacctatgtcccttctcccctagtgtgggggtctgtgggctccccagggtagtgcttaagcactttgcaagaggtgcaggctgctcatttctccgattcccagttccctctgtttcctgggagggacgctttgctgcagcttcacctgcttatccctactctctacagctagatcattgtccaggccttaagctctgtcagtcgggcacgtgtgcacacacagacacacacacgcacagctggatgtgaactcttgactccagtgtgtttctaggccagcctgcttgttgttcctggttgctccgaggaaaggagggtgctgattgctcctctggatccagccggacgcatggaatgctgcaacatactaagcctgtgctctgggggcctaattacgtgggacttggggcaagcacaagtgacttcagcgcttggtttgatccagcgtgtgatttttgccaaagcaaatactttattaatcttaaccccccaaattagacacattgactttttctaaaaatgggaatgattggagagcagaatttttttttaaatcccctccccatcctgaacccctcctccagcaagactgggctctgcattcctctccttgaatggagaaggtgagttccatcactgcctacctcctcctctaacattcctgaaactaggtgctaggaaattgcccctttctgaaggtgtgttttttgtgtgttttccgcaagaggttccactccttcctacgtcaaggccaaagaaaggatttgccgtcctgatggaactttcctaactgggaacttgtcctggatttcttgggattctgatccagaatgtgtatagggaaaactgttgggtgacttcccatggtgaccttgagtgtgtctgagaggctcagccagaatttcttgtgtggcctgtgagtgagctagcaagccagcgaggtcagtgggccttcccgctcaacaccctgtctctctcctcaaagtgtcttgggtaaagggcatactcacagggtggaattaatctggcgttagagagtgagcttgttcttatctagtctaaactggaaaaaaaaaatgcatttaaataagcaacctaacctcaccccagaaaacaactcctagttaaccttggctcctcttcactcggcctctgtctttaagtctgagtgacctggtgggattgatcagctttgaagtcctaaggtgctattttaatactgttcttttacgttgcaggcttcgagactgatttaactagattctggagggagcttactttacagcattcttaagagctcgaacaatcttgaaagagttaaactctaattagctcattcctaaggtatttaatgcccttattaaaactcaactgctcgttcacttttttctttagtgaatcagatttcttgaggagctgagccttcgctcctcagatcacaggctcacatgttgaagctggcagtgctagaggctagttcctatctgtgtgacagcatttttaatttaacaggaccgcctttgatgttcccaaatatttataggcagctttagatcatttcagtgtgtgctttctttttcttctctctctctctctctcttttaactggagcaaaagttcttcctcatgcaacagccttccttttatcctgtttagtttatttttgtttcctttgcagctttggcgaaggctgtctggctgcattcacacacacacatgagattgacccttctttttgcttctttggtaaaggctacctctctgtatcctcctgcctgcttgagattgcttaaggcacttctgttcatcccttgactttcttcaggctgagttttttcctaatctggctcaggaatctgttctttggctgacctgagagctttcagactatcatgcagacctgggcattgtgtgaaagtgtctttttttttttttttctgagacagggtctcactctgtcacccagactggaagtgctgtggaatgatcatagctcactgtcaccttgatctcctcaagtgatccttctgcctcaacctcccgagtagctggtactacaggcacctgataccactcccagctaattttttcacttttttatagagatgaggtcttgctttgttgcccaggttgatctcgaattcctgggctcgagcaatcctcctgcctcggcctcccaaagtgctgagattataggtatgagccacctcacctggccttgaatgtgtctctttatggatgaccaggctgtaatatcctactctgcttgcctgcattgacactgatggggcctcagcaagttatgatttacagtgtatgttttgcagatactgttttagctggggcaggaaattcagatagacagaattctgtcctgatcatttcaggcttgctctgtttggctctgttagacttcttggctgaaaataacagagaatcaaagattttggtctcagggatgggaaaaacagggctgcaacatagatttgttaagccattaagaaaaagaaaaaggaaactttgtaccaatcaaaacaaatgatagaacagaggatagtgcttcctccagcttggcctctgggtaaacattctgcttgtgaaacaatccaaattactgaattctcagctgctgttacttacctgggcctggcagacagaagaccagaagatatcatggcttcttccatcattgctggctgtgcctcctattaggtggaagccttttagtgctgaaggtctcataggtggttgatgaaatgtgtgaatgaatgaatacactattcttgggaccttatactgtttttctcactagatccttaagaggattctgagcgataagatatttcatatctgtttttttagatgaggacactaaagtgcagagaggtttatacagctggtgagtgaatggagaagctggcctggagctcaggactgtgtcttatagcctcaccatgaggtaattggaggcaggtaaatccaatggcagtctgctaacctcttagagctaaaaaagcctgttgaggctaagcatggtggctcacgcctataatcccagcactttaggaggctgaggcaagtgaattgcttgagcctaggagtttgagaccagcctgggcaacgtggtgaaacctcatctttacaaaaagaatttaaaaattaactgagtgtagtggtgcacgtctgtagtcccaactactcaggagattgaggcaggtggattgcttgagcctgggaggcagaggctgcagtgagctgagatggcaccattgcactccagcctaggtgacagtgatctgtctccaaaacaaaacagaaacctctcaaggctaaaatctactgtatgttgcattgtgagagttcagagctgaccagattcttgccatgtaaggggcatagtggtggagagtacatccctgagaccagataggcctgtgttttgcatctcagccctgctactgacagctctgtgaccttggccaggtcatccaacctctctgaacctctgcttcttcatctataacatgggacagatagcttgtacgaccaaaagactatgaaaattagatgatatatgtaaggtgtacattaagtgcttaacacatgttcggttggtgtctgttgctacaaaattgtgactctcaaagggttcatagtcctgcaagaaagcatcaggtaaaccacctattagaagacgacttggcagctacaatagagagacgtgctggtgctgagtaggaacccagggcagaaaccactggcttggatttttattttctttcattcagcagatatgtattgagtgcttaccctgcgctggcagagccactggatcacactgattgctgccagctccccctcacctcccaattttctctttcccttcttgggagaatttgagctaaaatgttaattgccacctgaagaaagattttcacggagtcattttcttttctttctttctttctttttttttttttttgagatggactctcgctctgtcgcccaggctggagtgcaggggcaccatctcagctcactgcaacctccgcctcccgggttcaagcaattctcctgcctcagcctcccgagtagctgggactacaggcacacgccgccacgcccgtccagttttttttttttttttgtattttagtaaagacagggtttcaccatgttgcccaggctggtctcgaactcctgagctcaggcaatctgcccaccttggcctcccaaagtgctaggattacaggcatgagccaccgtgcctggccacatggagtcattttcacataaaatgccaaggtgccaaatggcacagccacactgcatttgaccatgtatcttacatggccttgtgctgtccttcaactctcattttaatcttatctaattttctccaatttctctggtctcttctacatgaaaactttatggtccttgagaatgtacaagcgactcaccaagggagcaggtggtggccgcatggttccccacagtgcccagatggtgtccgtgcctttcatggtctggttccatggggatttgttgataagattttgctttcatttggttttccaacccagcagcatatttagatttgattactggtactagcttttttctctgcagagtttcattgtctgagtcactggctgtcttgaaacataagtcccattctccacacccctgtacccctttgcaatcagtggggatggttatgtggtagaactttttccctgcccacagcgcatggtgcagagtggtgtcagcacactttcacttgctgagttgattggtaacatattgaatctagaacaaaagatacaattgaaaagcatttgtggttgtctttgtatagttacaagcctctaaaatagatttgaggtcatttctatgtctttccttttgaattagcaagcaagctttcagagggaagtgggcgttttctaaatgcactattgatttgaagctaacatgatgctctacttttggatcatgaaaataatgttaattttttatttggctgtttggagggaccactggagtaggtcatttatattcaactcttattcatgctttctttaaatagcatgtttaatttcacattaaaactagcttctgttcagctaaaacaaaaactgaaaagatggtttggaagaaagcaaaatgacagagaaaatgcagcatgcaatggaaattggctgcaagtcatctccataaggtgattgagaatgaagtgaagctcagctttctttccaaagaaccctcaacaaccctctatgttaacttaccttctcctgggagtcttggtggcctccttttgtccttggtgtatgttgcatgccaatcatgctgtagagaaggcagtaatatctagaaacacatcttgaactagcgttgggccgtgtgcaagtctcttttggtggggatatgcgagagtcactaactagcaacctttagggaaaaagaagtccaagagggttgaattagtaaccactggggcctgtacgtggtgatgtttgcttttttaaatgatccttgtggagcatcatttgccctgtgtcctatggggcatgtcaccccattccctggatgtcaaaactaagaacagaagcaaaatccattctgcattggctctccttctttagacttagccggattgctggatgcgcggtcagttggatgcaaatttgcttttgctaaagaaaaagaaggcctgcattaataatacaatgataagacctgtgctttcagtttgtgttttttaaagcggtgattagatttgtctgggtggagagcaaagatgaagctattggtctagtagagaccattggtccccagatgagggcctggtgtctccgttgggtgttttgtttgtttgtttgtttgtttttgagatggggtcttgctctgttgccaggctggcgtgtagtggcacgatctcgactcactgcaacctctgcctcctgagttaagcaattcttctgcctcagcctcctgagtagctgggattacacgtgcacgctgccacacccagctaattttttttgtgtgtgtgtattttagtagagacagggtttcagcatgttgcccaggctggtctcgaactcctgagtctgcctgcctcagcctcccaaagtgctaggattacaggcgtgagccaccgcgcccagcctctgttgggttttttaggcacacttgtctgaagaaagtcttttgattttgagccactttttagagctttgaagctcttcctgattttaactattgctacctatggaagagttgctctttgggaatggacagcaacttggggctaacagcttttaagcatggacctctcctgggggcgtgttgggcctgtttactaaccttactgtggactccgccttcagatcaggatgattttcatggtatttttttttttctcagaaaataatcaaaccaaaactttcccttgctgatacagagtgactatgcaaatcaggtctgcatgcttatcttcctagaaatgtagttcagtgaaaagaaaacagcgccttcctttagcccacatactttcctcattcataaaatgaatcagatgaaacttgatttcacccaggctggagtgcgggggcgtgatctcagctcactgaagcctccaccacccaggctcaagggatcctcctgcctcagcctcctgagtagctgggactataggcgcatgccaccatgcctggctaattttttttttttttttttttttggtggtagggaaagggttctaccatgttgctcaggctagttgcaaactcctgggctcaagggatccattcacctcggccttccaaagtgctggaattacaggtgtgagccaccatggctggtcacgcccagctaatttaattttttttttctagagacaggggtcttactatgtttcccaggctggtcttgaacttctggcctcaaatgatcttcctgccactgcacctggcctgatttgtatttgggagcctcactttctccattaactttttttttttttggagacagagttttgctcttgttgcccaggctgagatgcagtggtgcaatctcagctcactgcaacctctgcctcctgggttcaagcgattctcctgcctcagcctcctgagtagttgtgattacaggtgcccaccaccacaaccggctaattttttgtgtgtgtttttagtagagacggggtttcaccatgttgaccagattggtctcgaactcctgacctcaagtgatctgcccacctgggcctctcaaagtgctgggattacaggcatgagccaccatgcccagcctctccatcagactttggatctggaagatagtaagaaaaaaagcaaagtaacttagttctgtcctttcctagaggacgtaagcagtcttggcctcttcatgatggtccactttgttaccgaattattgggtacaaaagtgaggtctgcaacaggctttggatgtttcaaggtgtgtctggctgtggtttgctttctgagtgccagctttaatgtcctcttattttctggcaagggttgatggatgtggcactgaatattttctgaatagtgttcacagaatcaccgagtgaatgctggcctcctcctgcatgtctgttgagggagggcttatggaccagtgggaaagtcagatgtgtccctgagatggtgacagtataacatgcataggctgagtgccaaatgcttggggcccagagaaagtgcctagaaatcagagaaaggtcttgggggtggacctccagctggactcttaaggaagattggtgcttggatttgctcctgctggctcttgctatggggaaggcatttcttgctgagacccaggctaggctggcaactagtggagctttttctagcttgtgtagacctggaggctgcctggcatagaatgtgcccatggcagggcggggagaaagaagaggccaagtgaggtgcggctgggagacaacagatctgctatgctctctggtctgtcatttaagtgggatctattggattcagcctttctgagcctcagtctccacatctgcaaactgggtgtggggctagatgagattcctggggggaattgggggatctgcagctgtgcctctgaaggatgtctggggacagaagtgtaagtggggaagaagcacactaactggggaattggggagggaaagaactttggagggcaagttaggggagggataagaggggctttgaatgccagaaaagggtatgtgacttttatcatggagaccagtgggtcccatagtcagaatataggtgatgtctatgtgcatgaccgtgtttttggtgacacaactcccgcctgccctgtgtcctccagcagcatggtatgtaattgcagccctcactgcacagcagtcggcaggcttattcaggggcagttttccagcagtcactcctctcttgagaacagtctggaatgtaagggagtaagtgatgttctagtgacaaccttgaattcactttattaaagataaataaatcacatgccaactctggcctttagctgttattagtaacaaatagctttctacccgtacacttgaccattcatgacaccttggaagaaaattgctgccatggcatttgaccttggttagcactttgttttttctgagagtttttttttatatatcatgagtatgtagaaacttctggggagcaattcctcagttgcctttcgagtcctgcccctaacccctcagtttgggctccatctgttgactgccctgggtttcagaagggagatagtgagtgtgctctcttgaacatggtcctttaggattaggcaatagagtggtaggctggtttagacatttctggttattgacaggccttactgcggcttcccccaaatgaatgaggaatatatttttctaaatccagccagtgagccaaatgagccacactgggataaactttgtttgtttacaaattatgtaagagaagggcccggccattaaattcttctgagccagaattcctagccctcttcaaagttgtaatcaaactaaacaaacactttccacaggaactaactccctcccgagaaacaggagcagatgctcctgggaggccttcagcaactttggaatgtttaaagtagaaatatgtaaccaaggtgaagttgttccagaaacattgcctgctctggccagaaccaaagcacgtgtcagcttttttatttagggcaagaggtgcagaatggactgggccagtccaggcagaattttctttagaatgtttaatttttggttttcatcttaacccggcttctcatagtatcagctccttgtgacctttattcccttctgcttaagtaactctttttttaagcttgatcttatctcttatcttttagctatgctggattacatccggggatcaaggagcccgcctcttaaagcactcaattattgtccctaggaaagatgtcagctgtagcacaaacactccaggggagggaggctgaggctcgccttaacttcattattgtctggataagatagggagaattgccactctccagttcttttggagatccacaaagaccgtccatctaggctcagggacacggttttcttttctttctttttttttttttttttttgagacggagttttgctcttgttgcccaggctggagtgcaatggttcaatctcagctcactgcaacctccgcctcccgggttcaagtgattctcctgcctcagcctcccaagtagctggaattacaggcgcccaccaccacacccagctaattttttgtatttttagtagagatggggtgtcaccatgttggccaggctggtcttgaactcctgacctcaggtgatccacccatctcggcctcccaaagtgctgagattacaggcgtaagccaccgcacccggcagggacacagttttcgaatccttgccgatttgagtctttactgagcggcttgatttatcttggcttgggaagttgtggatttttagaacattgggtacacttgtattaaaatagatgtatactttcttaagccaattgcacatttttctggagtatgcccaagatgagcttttctcaaggcatcgcctgaagaacagcagtcctgcacaatgttctgtggtgaaagggttctatgaggatctatgctatgcattaatggtggggctcagtatttgagaaatactgttgatcctagttttctcttagagatatattctgcacagtagtgaattaatggctctgagaaattctgttgaagagcggtctttcactttatttaatctggtacttcccaaatgtacttgatcacagaactttttctcaaaggactcaaggtgctaggggatatggagtggcgggtagccagtattaggttagtttagggtctgcactggttcagttggtgtcctgttagattatgaggatggaaggccaacaccaagttaactaccagctttccacagggccctgggatagagtcatcaccacctagaatgaatggcctgaacacctttgaactgtggtaggactatttcttccatttcagcttagatttgtggtcttctctataattgggtgatggggtatagggagttgtagtataaaagaaccaagaaacagtgcttctctttgaagaatttaatttctactggaatgggaagattcatgaaggagttaaacagtaccaccgtccaagtaggtatgaaataatgtcaagtagcctgtcttgtaggcattttgtagcctgtcttgtaggcaggtgggggccacaggaagcaggggcagcctttattgtgacttgacttaccaaactttgggtactgtgatggcgggcagataagatagaggagtccccccgacccctgcagccctaaatgcctcttcgtttgccccgcctctgtgtgtaatgtactatgtgtgaaagtctcttagactccccgcaaggtagacattttagagttggatgaaatgcatgataagaactccttctggtactttccagatgtatttgatcccagaactcctttttctcaaaggacccaaagtactggggaacatttggttccttctggaaggagaactccctctggctgatctgcaggcccccactgctgggttggcatcctggatttcgaggtggccaccttctgtgactcttaggccttgagcttggctatctggttttggagacctggtgccttggaagtgctgggctgagttgaatggaagtgcattttccgggttagtctaccttggttaatgcagggaagagtaaataggctctgctgactctagctgcccataggaaggatgtgtgtgacataagcggggctgagatatcccccattgagatgctaagaggaaactgagatgaggagtttaaattcttctccaaatatgtgtcatatttcatagactgttgacatagagcttttttttttttttttttttaaactttaaaagttggaggccgggcacggtggctcacgcctataattccagcactttgggaggccgaggtgggaggatcacctgaagtcaggagtttgagaccagcctgaccaacatggtgaaaccccgtctctactaaaaatacaaaattagccaggcatggtggtgcatgcctatattgtcagctactcgggaggctgaggcaggagaattgcttaaacctgggaggcggaggttgcagtgagccgagatggcgccattgcactccggcctgggcagcaagaatgaaactccgtctcaaaaaaaaaaaaaaaaaaattaggttaacctacctgatggatattgttggcagctgagctctgtctagcctgggacattcagccttttgcctctagctttcgatgaggccccaggctctgctgtgtattaatggtagggcttagccttagttcaggacccatcccctgtcatacccccaaaccccagaggggaggcgttctctttttgcagatgcagattatcagaaatcgttcttccttacactgaaccaaatttcttctgctccttggttctggttctgtcttctagagtatattaagtatcctttggttgctataacaaagtaccactggctaggtggcttaaatgacagacatatttactcatgattctgaaggctagaagtccagaatcaaggtgatcagggttgatttattctgaggcctgtctccttggcttataaagtgatggttttcctatgttttcacgtggccttccatctgtaactgtctgtgtccaaattttctcttcttataaggacaccactcatattgtattagggcccacctatatgacctgctttaacttggtcacctctttatagaccctctctctaggtagtcacattttgaggtactgggggttaggaccttaacatatcaatttttgagagacagaactctgcccataacacagagccattaagacatgatgaccctccagatttctgaaggtgattttcttgtcacttgtcttttccttgctgagaacccccagttctttccgttctttatatgagatggttttgaagtccctcaccatcttggaatcttctggacttgccttagttttggaaggacaaagtggaatactttggactacccgtgatattatagatagaattcattctaatgtctgcccaagcaaacaattttgatgatttccgaaaaagattaaaaggctaaaaatcagactgtacagtttcagtaacagctttaagatatttgtctttaattttgcctgagtaggtctgaccactgacacacacacgggcaccgcccccatatcccaccccatgcatccagtgctaactttatgtcttcttttgacttaagcatttacgttagagttagtaagtgctcaaggtctaagtttgttcaccacccttcctcccttccttcatacttttttagttttaggaaacctagttgggagggttatttcaaaagaataaatgaatgtagagatttttattttttaaatttaaattacatttaatttttttgagatggggtcttgctctgttgcccaggccagagtacaatggtgccatcacagctcactgcagcctccccctcctgggctcaagcaattcttccaccttagcctcccgagtagctgggactacaggcaggtgccactgtgcccggctaattttgtttatttttttgtagaggcgaggtctcactaggttgcccaggttggtcttgaactcttagactcaagggatcagactcagcctcccaaagtgctgggattataggcatgagccaccatgcctggctgagatttttattttttaaatgtaattgctgtctggagagggtagaaataactcagttactggagtataactcattttaggttcataatgtcatgccaacctgtagtgtagttagatttaaaattattagttattctcttcacttttggaaattgtttactttttattgcccttgtgcaccaaaaattgtgtcaaaaaagctcatatgttttgttctttgcattttcagcacttagcagagtgaaggttaaaaaaaaattgttgagtgactaaaggcatcctcttaatcatcttgtgcttatttaatcaggagcatcctgttgtgtctttggtagaattggcagcttggggtttagggattattctggccgctgtcccttttgcttttgaattgtggagctccccacaaagagaccctcagtgctgttcactcttctgctaaattgtggtttgtaagtcctgactgatagttttgacaggctttttctccttaccgtagtctctttagatggagtgtgacgctcttggagttcctttctttgaagatgctttgactataccgcccaggatttccaaattgtagcctttagatgcctggaaccctggccccacacagctgttaggccccctctattctggaggcccgacaacattaaaaataccaactatttatagcatacttttcagtgtcagtaaattataggatgcccttgccagtggatggggtgaacgctcatctgcctgccactgtgtgattgcctagaagcgtcggccaggtggcaggagctcagccccacctgaatgctcccaggtcctcacctggcactcccacaggaaactaaggactgccaggatgtcttggggttccagtagagtccatgtcctttgcgatggagtggttggggataaaacacacacacacacacacacacacacacacacacacgacactaggtatgtgtgctcttgagagaagcccattctgatctaactgccaactcctcaggaggctgtgttgtcagccatctgtgcacagaagtttgctgcatcactggtgagctggggagtgtcctgtgtggtgtccacttaatcttactaggaaggatcccctcatttcaacaaggtaactgaagaatgttaaatctaaatttgggtaagatatactctctgtaggctgaagaatttgaagagtatataaaagctcttatagctgggtgcctatagtcccagctacttgtaaggctgatgcgggaggatcctttgagcccaggagtttgaatccagcctgggcaatagtgagactccctctctttaaaaagaaaaaaagcttttaaaaaggccaaaaggacatagggtctttatcttccctcagctgccccttggaaaggatctcctggcttgccattcagagtacacagtgaggggaggccccctccacagggtaccatttagaacaggctcagtcgttagaacactgcagagggcgtgctgtcccctggccaccaagccaagttgggcttttggggacaggttttgtggtggtagcttttgggttcttcatttctttgcctggactgaacagtgagcagtgctcaagaggcctgttctgttagctggagtttccattgaagtgctaactgctggatcctttgaacctctagcctgggagggtatttataactagctgtttgcgtgcttagaggaactgaagtcctgcctttctgtagtggtttaagagctgtgcccttggtgtgggctgaaaggcaggcctggcgaagtgtggggactcaaatgcccaactccccacgaccttgtttgccttccccctgccctgccagcccagcggcccttttagggttaacttctctgctttggaagcagctggccagtttacactcctccctgggctgtacaaaaatacttcctttgaagtgttaggagaagcggtgaagggtaaaacctggtgaagaataaaacctggagtggggcttgaatgcatttctcttccagggagtttgctgggtgactgagccccacagccttcctcgtaacctatagagctgagtggttctcctcacatagttacagcttggagcctagttgcagctggcatgtgcatgtgtgggtgcgtgcgtgtgtgtgtatgcacacgtgtgtgtatgtgtatctgcatgtgtgcgtgtgtgtgtgtgtgtgtgtgtgtgtgtgtgtgtgtgtgtgtgtaaagtctcctcaaaaggagtatttcttttcaagagagatagttagaatacagccaccaagcttgcctggtggctggaatccctttgaaggcacttttccctagggcgggtctgagtcagggtggtatcctggggtatgtgcgaagctacaatgtttccacttcgtcctaaagtggccagccctgttcttgctccctactggggtaggaaagctgccactgatcccatctctgattcaggtcaaagcacagcagcctaaaagaacgctgggcatgaagtcagtggtgctgacttctcttaaccttgggtttcccatcaataaagttgggctggtggaaataccggattgggggcaccttgagaaagtgcaagacacttctctactgtaaagcctgcagttgagcagaaatggcatttaggataaagaggccaaagagaagaatgccagagcagaaatgagacggaacaaagcttgaatgtcttcttaatccttgagtatttgcagccaaggaggggttggggcaagatgggaggagaggcagctgttattttctagagaagaatgccaacctgtttctccccacagaggggaccacacaagttatttctgaactggagtttgcagtcccttctttcctggaaaatgccttcatatggatttcttacatcttattacactacttcctatctcccttagacaaggagtgtcccttagacagatctaaaataataccatagagctaacatttattgttggcttttgccaggtattgggttaagcacccaacattaatgatctcatttattcctcataacatccctatgctggttgctgctgttgtcctcattgaatagatgaggaaagggaggctggaaaaagtgagatgacttatccaaggtcctcttacctactgatgcaggtatggaaatacagacccggttagacttttagcctctttacttttttttttttttttgagacggagtcttactctgtcacccaggctggagtgcagtggtgcgatcttggctcactgcacctcagcctcccgagtagctgggattacaggcgcgtgccaccatgcctggctaatttttgtatttttagtagaggtggggtttcaccatgttggccaagctggtctcgaactcctaacctcaggtgattcgcttgcctcagcctcccaaagtgctgggcttacaggcatgagccaccacacctggccccctttactcttaagagatgtaagttacaataagcgatgagggggtgaaatttaattctgtgccccaaacctgatcagaagctgtttttaaggaaagaggtggaacattgaactctgttcattctggctgttttgactcatgttatattcatcagtggacttttattttattttttgagatggagttttgctcttgttgcccaggctggagtgcaatggtgcaattttggctcactgcaacctctgcacctaccctggattcaagcaattctcgtgcctcagcctcccgagtagctgggattacaggcatccgccactatgcccagctattttttttttggtagaaacggggtttcaccatgttggccaggctgatctcgaactcctgaccttgggggatccacccacctccccctcccaaagtgttgggtttacaggtgtgagccaccgtgcctggcctattttattttattttttgttttgagacagagtctcgctctgttgcccaggctgtagtgcagtggggcaatcttggctcactgcaacctctgcctcccgggttcaaacgattctcgtgcctcagtctcctgagtggctgggattacacgtgcccaccaccacgcccagctaatttttgtatttttagtagaaatggggtttcaccatgttggccaggcttgtctcgaactcctgacctcaagtgatccacccacctcggcctcccagagtactgggattacaggcgtgagccacagcacctggccagcagactcttattgatcagttatatttcaatacacatgagtgcgttttgccttgcggttactgaaaagaaacttttcttatttctcattctctgtgttgactttacaatagctatgcttttttccctctcattagaaagggttgggaagatggctgctctgtaactgcagctttgttacggttgaaggtcttggtgtcagggattgacgggtagcctgtaccccttggaatccttagctgtaggctttggtctttccccagcctagaaccagacttggcacttacttcaaggggcttgagatcctgtgcttgaccctccttagctcatgggggaaaccaaggcctgggaaagtttgagtgatttgcccccagtcacacacggggctagacccagggccaggctggcaggttcccagcccactggccacatgcttctccttttcacctgaatttcaaacaggagggaagatgaaagggatagaaatgaccagtcagaggagtaggagggctgtcatttgcaaacagtttcttttgatctttgccccattgtttaaaaaacccccaccaaaccacaactggtagcatcagcacatggttccctccggttcattgaggggcagtcatttctcttttaagtgggaagccccccccacccctagtagtctgtttcacttagggctccatacctcctctccccttctgctactcggctgccagatgtgctccccttcacaaacctttcagagctttttactgcttataggatggagtctaaccccgccttcccctaatattctaaagcccttgacattttgtgcccagtctgtctttgcattttggcatccaaccacagagccccttgcctctagtcaaagggctcctccgaatgagctttggcctttatttgcatctttgcccacattctgcccatctttcaatgctgctgcctccaggaagctctgttggactaatgcagcacccagttgcctctgctgcctccgaacctgaaacaatctggtctggcaactcatttgacacttaatattgttttgtgttgtttaacttgtagatgtgtctgtctccctaactagattgtaagttcactgaggtcaacagcatgccttctgaactgcttcgtattcccctctgaactgtttcatattcccccacagcattccacagggcctaggttgtatgctgtgcaaagatctgggactgaaatgctattatctttctaactgttaataggaatggaagaaattagtttccccaaaaaggaataaaatgattaactagagagatttttaataggatctgtgctacgttaggattaatatataggttgagtatcccttatcctaaatgcttgggaccagaagtgtttcggattttggaatatttgcatatacataatgagatgtctggggggtgagactcaagtctaaacatgaaattcatttgtttcatatacaccttattcacatagcctgaaggtaattttatacagtatttttaataattttgtgcatgaaacaaagttcctcttaagtacttatgtgtggaatttccacttgtggtgtcatgttggtgctcagaaagcttcagatttggaagccttttggattttgcgtttttcagttaaggatgtttaacctttactttaaatcgggttacttgaatgaatcagggaattttagtttgttgtaattatttttttgtttgtgtaattttgctggcaaacagtctatagtgaaaattttgacctagaccccttcaagatgaaagtaaataaatgcatgttatttaaaatttgctgttgttgctatttagcaccctagatgcctgtttacttttttactttgttgttcttataactttttctctaagtaatttcttggatccgtattcgcactgttacaattgtgttcttgaacatacttctaatcttttttagccattatgataatatattttgttttcttgaccctttctgtagtttgttaggttgatggcttccactggaattttaggtttgacctcccaaaggtggatccacctgtatgggaaagatttgttttcccttctccatcccctcccagtccctctgcgttctggccttgggtgtatgaaattctggccttgaacacacctagcagtcctggcccatgtccgtttcccagttaactcttttgtgcccgatctatatgtggcatgttccgccacagctgtgggtggaatcatgcttgtgcccccatataaccttttccttcttagcatttttttcttttcttactcctgagttaaacgtgtagcagaagaggtgtaaagacacagggccagcatgaatagtgctccctttttaaaatgtggaaaccggcttggagaagttaagtgacttatccaaggctgtacatccagtaaggagaaaaactggccttgtgacatagccccagggatgtgctgtgccccgtgatggccccatatgttggtgttgggagttcagtggctcatcaagtgcctgtagctcttaaaggaaaggagttgataaaatgaagcaacctggggcgcttactccaggggccatttctaatctgatttctgtaagtagtggatttttgagagtgggttcttgtatttcctcctggtctgctgtgttcatgggtatttttctggagagatggactctacatcccaaaactggtgaagatcccctgatagaggtgccgctaatgcccctccccatgcagggattgtactggagaagctgtgtctgtggcctgcacccctctggaagctccagtgagtgtcctggggacacattaggaaagtcagatgtgatctaccctcacacccgccagtctcaaacggctttttttccttcttaaaagtaagcaaggaataaactttaaaaatagcaaagggtcagaagttcctttttttttcaagcttttattataggaaatgttacatgtagactccaatagatagaacatgttatgtacacaccgtccctccatatactcaccatcacccaaaatagttgtcaacacctggccccgcttgtttcacttacacccccatgccaccctcatgttattttgaagcaaagccagccatatcatttccctgcccgtaaatatttctaaaatatctataaaagcttctttttaaaaaacatgatctcaaggctgttcccacaaatgttaagctagtgatgtcccctcccaaggggcaaccccacactccctgagagatggtgtatgtgtttcactgctcatgcactggcagccacgtctagaggctgggtctggggtggagcccaagtggggtgggggaccgagcgggcgaggccatggctttgcgctggccgggcaatcatgatgatctcggatcccgcgtgggcgctgtgatggtatcggctttgccccgggcgggaaccacaagatcaaaggcgccgcgcaccggggtgcttcaaagccagtggagcagcccggattgatgcccagaatgagagctctctgctgatgtaatcgtagcctgtgagacaggttctttttttaaatttaaacaaagacaccccttgtttgtttagtgaggtgaagcatgtgttgcagagggcacgcagcatctggagggctccactctggcctggtgggtccatggtagggcaggaatgctgcaagtgactagaattttcaggcgggcttgtagatcttccataaaagacaacctgtttctgttaagagtaatttttttctcccttttttagtatagtcaggcttgttctcaagtgactttcctgaaatactgaaagtgctttcctctggtggggttgtcaggctttggaacacacctggtgagccagctaggaattcagatcaaaaagtaggtaagcagccagggcatggtggctcacgcctgtcatctcagtgctttgggaggttgagaggattgcttgagctcaggagttcaaaccagctggggcaacatagtgagaccctgtctcttaaaaaaatttagctggctgtggtgatgtgtgcctgtagtcctagctacttgggaggctaaggtgggaggatcgcttgagcccataagttcgagactacagtgaactatgattgcatcacagtactccagcctgggcaacagagcaaggccttgtctctaaaaaataataataataataatttttaaaaagtaggcaagagggctgactttggtcagtcattccttgggtctagaaaggaagctcatctgtcccttccctagagtatgtgagaggcttgcccaaggctggtagtcagatcccatcctgttggaaggagagaggggtctccaagaatatggctgagtgccaggatcaccaccacccctagcctgaatattctcccagtctctgtaaaaatcatagacatgtggctgatttttctggggtattcccagttaagatggtatccctgcctttagtagttgatcagtacacaaatcagtgaaaccctgtaccatacatacctccatgagtgaaatcgtggtcatattctgttttcttgcttagcaaatcttgctgacagatagatgaagaagcctgccaaacggagtcagcttgttggatgctgaggtccttcccaagatcttccctacatcagaattcagggtcagtggggtctgaggcactactcaacttaagtcatagtgactaaagtccacttcagcatcttacagatgtcccaaccaaacccagcatgtgtaaaaccagatttctcttctctccacaaacctgtttctgttaggttcttttgttactccagctaaaaagctggtgtcattctaagctgtttatcctcaatgaggtgtccccttctctaaccccatgatgcctctacccatgcacattgaattgtctgtaagttactggaaggcaagactggaagggtttttccttcccttttaaactacaaaccaggtttcccccatcttctgtaaaagcaccccccaatattgtgaatttcaagcatgcaggaaaagtgagagttttgcagtcgacacccatatacccactatctatattccaccgttaacatttcactgtatttgctttcttacattttttatctatctgtgcatgtgatggggttttttgagacaaggtttgcccaggctggagttcagtggagcaatcatgaatcactacagcctcaacttcctgaactcaggtgattctcctacctcgtgatgggtttttgatatttgaaaatcaagcacatgggggctgagatgttataatggatgtgacagagtatgtaaggttccctttttaatttggtttctatcacttttagatccaggtctccccttctctccctatctactgcctccccgctaaccaacccctaccccatcccctggctgggaatagccctagagatcttgcgtctttgttcagacactcaagggagaacccaggaagttgcacctggaggaccacctggggcatggagtttgctatggagaccctgttgtgtttgaatgacttgccctctcacatttcctaaagcctactgcccttccttcatcttgtccctctctttgccttctagtggtctggccttgtggctacagtgagcatgtgcacattctgttcagagactgcagttttttgtgcaatggggtggaggtgctgctgcagagcatggagcaagccagctgggtgggacttctggtgggttttaaattgatttgaagaaaaatctctaaacagtattttgtttctttgattgattgatttttttaaagagatgggggggtctctctatgttacctaggcagacctcgaactcctggggtcaagtgatcctgccacctcatcagtctccccagtagctgggattatacacacatcaccctgcctggctttttttttttttttaattttattttttaaagtcaataaaataggccaggcatggtggcgcacacctgtaatcccagcactttcggaagctgaggtgggcggatcgcctgaggtcaggagttcgagaccagcctggccagtgaaaccccatctctactaaaaatacagaaattagctgggcatgggcatgcctgtaatcccagctactcgggaggctgaggcaggagaatcgcttgaacctgggaggcggaggttacagtgagccaagattgcaccactgcactccagcttgggcaatgagcgaaactccatctcaaaaaaaaaaaaaaaagaaaagaaaaggtgaataaaacaagtggctgggcgcggtagctcacacctgtaattccaatactttgggaggctgaggcgggaggatcacttgaggtcaggagtttgagaccagcctggtcaacatggtgaaaccctgtctctactaaaaatacaaaaattagctgggtgtgggcacatgcctgtagtcccagctactcaagaggctgaggtgggagaatcacttgaacctgggaggcagaggttgcagtgagctgagatcatttcactgcaacagagtgagacttcatctcaaaaaaaaaaaaaagtgaataaaacaagttacttttcttgagattatcaatgtaaacttgagttttggctgagtaggggcattccattggacttggcaaagtcagcttatctgaaatgttaacgctttcatagaaaggctttagcttttcttgtaaacctgctcaaagcaccgggcgtggtggctcacgcctgtaatcccagcactttgggaggccaaggcaggcgaatcacaaggtcaggagattgagaccatcctggctaacacagtgaaaccctgtctctaccaaaacaaacaaacaaacaaaaaaaacctgctcaaaggatccgggaagcccagaaaaatttgatttatatattaaatgagcatgttttgcaaagttaagatgagctacaacttgttgcacttagaatggctttatatgaactattttcttttgctttgctctgtatcccctccaaaacaaattaatatgtgattctgtgtgtgtttgtatgtgtgtgtaaggtcttttagagtagaagcagcattcatcatcttcgctgttgtgaacaggagctggacaggtctacaagctaacctgattcttagaacagactagattcacagaatagataagctctttatcacatggcagcatattttaattccagcctgtggcttccctccttacgggagctcagatagatttctcttttactgtgtgtgtatgtgtgtctatatgtgtgcatgcatgagtgtgcatctttagaagcatgatctgactttgcattgggctcctatggcttccaggatgccaagagctgtgactttagctacctgggtagtggatctgctgactgtgccttttgtgccagtgttgtgcctgttgtattttgctgtagctatagaaggcagctgcacaggctttaaataatgaagtcaagaccaccatctccagtttgattttgtttagagaccatttttggtacagtttagagccagtggataattgcaagttgattagtgtctcccaaccttctcttttggtctgtatttaatttttgcccaatcttttttaaattttatttttaaagtttttaagcccatagaaaagttgaatgaatagttagttgtgtgtggcaaaatgttaacagttgcttgatttgtgaattctctcttacatacacttagttttgattttttttacccgcgtttttactcactttttaaaaccacctttttaggccagactatttgaaagttgccaacataatggcatttcacaccttagtactccaacatatatacatctgctgagaccaaggatgtactcctaactgctgtgccattgtcacaccgaagaacttgacatatttaaatttctctgattgttccagaaatgtctttttttttttttttttttttttgacggagtcttgctctgtcactcaggctggagtgcagtggcacaatcttggctcactgcagcctccacctcccgggtttaagcaattctcctgcctcagcctcccgagtagctgggattacaggcatacgccaccaaacccggctaatttttttttttatttttagtagagacggggtttcaccgtgttagccagggtggtctcgatctcctgacctcatgatccgcccgcctcggcctcccaaagtgctgggattacaggcgtgagccaccgcgcccggcccagaaatgtcttttatagatggctttaaaaaatccaggacccatgcaaggttcccataaggtatttaaacttttaaaatatttatactgaatagatgcacaggtcctataatgctaacaagaggcaaaagacaaggaaagatttctctcacaattctactaccacagtttcaaaccaatttctttttcatctctctgttctttaaaaatgaagctttggacagattttctttagttcactttcctaaccatccatgagacaaaaaaagaacactgatcaagactgtggtgctgtttgactgcataagcacaaattgtggtctttgaaagttcttgctgagagatttggagttttattaagaataccaggaagccagcggcctttgagtaatgtttgaaacaagagggaagaaatcaactattgcttttgtttgttcaaaagctgactttattgatgatataacagtgtctgtaggtcttgggattcctttttccttattgtagacgtggtttctccaccttggcactgatgccatttggaactggataatttttttgttgtggctcctgtcctgtgcgttgtaggatatcgagccacatcccaggactctacccacaggacgccagtagcaaaacctccttcccagttatgacaactagaaatgtctccagacactgccagatgtcccctggttaggggcagggaggggcaaagttgacctcagttgagaactactgttctagaaattcttcaggactaacttaaattgagattgactgtgttactgataaatttctgcggagggacattttcttttataataagccccatcccaatctgaaaatccagaagtgtctagatgtccactggccaagggattgaaatcagttggcagatgacaactgagtgtgtgccttttcacgattttcacactttagcagaagccttgttatctgatactgttgggacctgtaggtggttgggtaattgaaaaaggtcagttaaattgaagcagggaatgatttaaaaagaatcatcttaagttttaattaaagcttataaaagggattcaagctcaggcctttgtgaataggaccacagatatgcactccttacattaacctcagccttgatgtatcgtttaaaacatttctctcagtttgagaaaaaatagaaataaaaaacatttaaaaagaaaaaatgaaaatgtacatttctgatgggttttttatttgtttgttttttcaaagcagaacaaatacgtataaacacttgtaaagctatcaggaactatctagaattttgcttttttttgtcttccaaagttgcacttagctctcaggtgcttttttttggtttttgttttttttgtagttatttgccttcatttagtctttctatccaaagtatattcaacttattttcatagaataaaatagtatattttgcattgtttaatattaaaatcagttacataattataggaggtgagtctgcataaacagatctagaaacacatatagctcagctggtgggagcagtggtgtgtggaggtactagagagtagtttcccagccaggagtctgcagtgcatgcaggctgaagttataggtctgctaatagcccctgccatattctgaaattcatggaaagggccccagaggatggttccgatttgagagttggaagattgggttcaagccccggttctgttgctttctccatggttttgggacaagcccatcagtaggcacaagcctcaggttgcttatctgtcaaatgggaatgatagtaatgcttgtcttgactacggagcaggttatcttgcaggttacacacaggccacataacaggaaatgcctttataaatgttccatggcgcactggtatgttattaatgagctggttatgctgagcctgagatgtgcacttctgagaatgtgttggctatcctttgctctttgagcacagagcacttgagcctcacagtaagagatttaggtcagaagaggaatggagggggccttgctcaatgcaaatttatacccactcttgcagaaacagctttgggctcctgccatgctgaaggtggaggcacatcacatggctgggtctttgtcataggttttgcttgagtggagattactggcttctcagtgataaacccagtgagcaggcagggggtgagaataccaagggtttggccagagtataacaggcagccaaggttctcattacaagtcctttacccatgctttgatgtgtatacaaagtgagtgacatcgtgaagattgtgccaccctggaggaaaagaagtagtcatttcagtgcaacactttagggtcttctggaaagtaagaaattatatttatttttgccagtatgcctcttttgttcttccagtgattcgtcagcaggttgactaaaattagagccgtctgctagtcttgtcccatctaatggttagataaatcttgcactgatgttcataccttgaaggacccttttttgtggaacttcatgtgttagagaaactgaacctgtgtaaaatggagcagatccaattgctctttgtaaccttgctccctgggcccccaaagaagctagaatctcccagttttggccccgtaggtgaagatgttactttgggagtacttgtgtaacctgaagaagactgaaagtatatagcagttctcatgagggaaaccctgggattattggcctaagtctctcttcagtgcagcagaaattctgctgttagaccggcattactgtcttgacaaaaggggaaacaaagaggctactacattgttagggagccccatccatctgtccacccatctgtccatctgtccacacacccatctgtccacctacccatccgtctgtccatctgtgcaacaatgcaaggtactgggaatattgcagtggaaaagacaaaaacccctgccctgtggagccaacattgtactaggcaaaccagatcctagcacattgtcaccctagaatcaggaggactcttcctgcccagttccactgggctagacatgtaaagagaatatgtgagtaatagctaaactttggtcttactcagctaaactttggtcaaatggcaaaatacaggtgaggttcctatggacagagaaggcagatggcataatggggatatgctgagctcagtgatgcatcactgtagacagcttgagaactctaggcatgggccagcttgggacagaggccatggaagagacaggtgtagtgcgtggcacctgtagctgaggcttagatgataaccttactctgctctagcatggagaggacccgttcagccacacctgtggtcatcattgagtgcctgtttgtaaccaaggttgaaaggattgaagaagaggtctgtgtgataagtgggaggtggaagagctgatggcttatcttagctggggaggctgttctgtctcctggccttggtttcctcacctgtaaaataaggccggtatctcaaaggtcacccaggttaaaaaaaaaaatcttaactttgttgagtaagaatgtaactggttgcctctttgatctttgatcagtgatccgcatgagtggagagaacctgacttttcctggtgcctgctgcctttggagtgagtgcaaaatgtccattttgctgatgacaggctccctgttggcatgtacagagaatctcaggcagtgtgagagtgtagtagccacctagcaacattgggtctttgtgcgcatgtccttgtgatctatcaccatgctgctgctcatcttgatctaagatgcattgccagtctgccctgcattgactcagctgagaggcaaaactgggcagaaaagtgggcttctgcaactggaaccccaaaagcctgggcagagctgacccgtattgccttgaatccttgtcttgggtgttactggccatggttggctctccttaagaaccgtcacagaagaaagtcaccaaatgtctgtctgcccatcaggagctctgcacttgatctcagctaaaaggctgagaagagattcatcaggagctctgtagccttcttgataccagcagtgaatctttaatacatgtcttctctaagagatactgtctgttctctctgatctttcccatgcccccttcctctcccttcttctaccttaatgaaagagcaaaacggctaattatatggaaacaaagattgccaaggtttgtattaggatgaagtgtgtgttccacctatgatagtggccaaatcttccaaagtacatcatctgacattttagaatacagacttccctttcatagcaaacctgtattttaatagcttgtggttttaaaaatatcatctaaactcatgaactaacgcattcttctcaattatatcccaactctaccatcatcttctctttcttctccttaacttctctggaaattattggaatctgcttttaaacactggggggattgtatattatagttgtttaaaaatgaatcaatttaagtttgagcaatgtggtaattcaaagcagttttaggtgttattgggattttttataaagagcattcctgagcctgaatgaagcagtcagttttcctgatgagccatgagcccattgcattaatgtttgagtctcctggtgctcatgataacgattaaggagttaatgttacctctgccatgtttaaacattaaccaaagggcttcctctgctattatctgttatcaacaattacttggaacattttctggcagtggagctttgtttttcctccgaggagatgctagaacaggatgagaatagacattaggccacatcaaaggaagattcttgattatgtccaaagaaactctggccttgtgggtacagagagtttgcctccttaatattttgtaaactcctatcacacccccacccccaccccaccccccccacacacacacacacacactcactctctctctctctctctctctctctcccctccctcctccctcctccccctccccctcatctgggtctgaggaagagggctgcagtgattatttcattgtatcatggtgagtggtacctcttttcttatttgggatactcattagagttgctcggtggagatggaatgatggtggggtgcagttaaacatggctgagtgctttctgcttaaggacctgatgtattaatgctctccaggtcattcatatttgggggaaggaacaaagagggtactgctctactgcagatgtgttcatttgcttattaacaaaaggctgggtgacccagaaacttaaaccctgagaacaaaagtactttccagcttccaaatgggaagatcttggagactcttgagtggctcctctggagtgctttctttaccacctagctgtttggagctgtcgtgcctaatagcttctcagcctagagggccccataaaattttagtctgtttctgtatagagtgctttggagtggccgtttctctctgcctcttatttactctcaaataccctttggaaaaagagctgatgaggtgcattgagacttggcatcaaaagccattcattgatagccatcgctcaactctcttggacttaaattttgttaaacaacaatcacaaaaagtcttaaagaattacccctgtttcccctgaatgttgaagtaagaaagaaaagaattactcctgtaatgcaagaagacatactcattaaaatctaaacagcgaaaaagtatatcgattaggttgggcgcggtggctcattcctgtaatcccagcattttgggaggctgaggcaggcagatcacttggggtcaggagttcgagaccagcctggccaacgtggtgaaaccccgtctctactaaaagtacaaatattagccaggtgtggtggcagatgcctgtagtctgagctactccagaggctgaagcacaagaatctcttgaacctgggagatggaggctgcagtgagccgagatagtgccactgcactctagcctgggtgacagagcaagactctgtctcaaaaaaaaaaaaaaaaaaaaagtatattgattaaaaaggggaaaccctcccatcctgttcttcctgtagatatcactgggaccagctgggtttccagtttttttttctgtgcatttctctatactcacacatggttttgcataaatgggattatcctatacacctgttacttgacttgctggcccaggacttctctgaatgtagggtatgctagatgcacgataacacagccccatcatggcttgtaattcaggcatttagcgtaagctgctgggtttcacttttcttctggaagcttcaggcattgccctgctttctggatgtgctatggttctggattcttcctttctttttctcttaatagggcttgtctaggatggaatttcaaaataacttgattctttccatctgagacacaagcacacaaaccctttagcagaaggtttttaaggttgcctgtgtacctgccctttgcccctagaggtcccactgtgagtgccccagtcacatgatccactctggccttatgggggcagcccaccctggcgcccgtgtggtgaagcctactcgttgtcaggtttccagtcattcctctctgcccttagccctgttgttctgtggctttgctttctgggtgctctgcccatgtcctcagttcatttctctcattccgggttctttgcctgaaatatcctcactaggctccactctttggggtcaagactgctgtctttgtgcacttggaggctagcctgtctctgttgaagtaatgtgtgggtagggtgcccacaccaacatccctgacacagatctggccagccaccttggatcagcctgctgccttctcccatctcctcttagatttgttcagttccaccctttattggctgcagaaaatgattctctacaattctttcactgtggtttatgatagaatccattttcttaaatctgatgtaggatcactttccccagcagcaaggtaattctcttagggtcttcaaaatggctcccctacccgaattcccgaccatcccactaactcagagggtggggagaggtgagtagatgatgcatttgcttcaagaagtgttgcctgtacttcccatccatcaccaccagggcatattgaacccctctggcaggctcttctggtgccctctgtgatgtgagaggagttcgggggtgcagagtgaacatagtcaaggtaatttaggaagctaagctctccatgttctccttggcacaggtttctctgagtcagttggtcactccctcccaaccgccatagttttgtttcaccttggggcttttattgtgaatctccacttacggtgctcctaacatcttgcaaaggtctttcagccataggtccctgatcaggaaaaatggtctcctctctgcactccagttttattctcctaatcctctctggctgagagtcctgacctgactcagccacgccccagagccagagccctggccacttttccagcttggtccatctctcatctctgcctattcagcctaggtgtcgtgaccatcatgcccacccagcatgccaccctgtgtggtctcctgccttgacaaggtgtgtcccttgccctggagtacatcagcaggcaaccctgactcctttcagctcctagtgccccggtacctctcctgggatcctgaggtccactctgctggatgccctggcagagcagcaggctcctgggagcacctgggattgtggcccctgcttcctgggcccaggaagtgccctgagtagctacttggtggtgggtgggttacttctgatccgtttatatttgctgtactccagcccaccttggttttttcatccacagagtagaaataaattaagtggctctaagaagtagtgattctttttttaaggttggatttctgtgcttttcttaaccatggctttcatagttttgctaatagacaaaaacagtccctcgactgcctctgagagtagagctgaaataaaaattctaggcgtcttctacagtagctggagtcctgcactgtccaaggagtctcagaatgtagtaggaggggaagaagctggggattatatatctacctggaccatggaacgggatcaaagaagggcattgagcggccatcccaaagccagggcttgtaacttaacatgacacctcattcatctgagctgctactgcatacaggtttaggattctttttaaattgtgcaaatgagtctctatcttttaaactcttagctgtcatgccctggctggtgctgttattataaaattgagactggaggccatacatttgaagacgaagacagtaatccgctgccaacctacttctctcttataatatatatatatatatatatatatatatatatatatatatatttttttttttttttttttttttaacaaaaggaaagaaaaaaactcatgccagacttgtttgtctgagatttatcactgtagggatcccagagacccccatggaagctggctttagtggtggctgcggctggggactggacagaacaggtcagtgtgagcttgaactagactgcgcctgcctcctggtgcacgtactgtgtttgggcatgtgttggctcttaaaatgctgttcatccatcaacatactgaccccttttgcaagtttcattgttctattattgtgactataaaagtggcacttgttacaaaaccagtttctgtgatctagaaccgtgttctcaaacttgcatctatcagaatcatctgccccacctctagagtgtctgatcagtagctttggggtggggcctgagaatctgcatttctaacaagttcccagatgctgctgctactgcagctgacctggcaaccaccctttgagaaccactgatctagaaggtacaaggaaatgaacatcgtcttcagtcttaccactcgggagagaaccactgttaacattttagggtataatgaatatattcatacatatgtggacatatttttaaaaacaatgatagttttgtgctgtacatagcgttgctttttaaaaaaacaaccttctttcttttggaatagttttagatttgtggaaaagttgcaaagatagaacagagggctcctgtatacccagcacccagtttctcttactgttaatatcttacactattatggaacatttgtcagaacaaaggagccaacattgatacattactgttaactccacattgttactgcttttattgaaaatacatgaatgtattttcataggattcaaatatcagaaatacataatgacagagtgcctcttcactcctaccatcccacttcctatatatttcagagtattttttatatatttatatacacatgtaattatgcacacacacccatccatcttattttaagacatgcttttttcatttaaatatgtcttgaaagcttttttttttcagtatacctagatctgcaccattatttttaatggacaacacattgttttacacccttttaaatatatcttatctattttaatctagcagattaaaggtgaggtctggcacacctcccttttatcttaaagtggaggttagagattatttgccctcctttgtggagtacttagcgtattctaggcactgccaagcacttagcgtgtattatctaacctagttatcaaaacagtcttactcataggtatcattatccctgttaacagatgaggaaactgagggtcagggaggttaagtgagcaaaaacttttgacgactttctagctgaagcaggctgtctctggtactttgggtgacatgagctgttcagcttagggtgaacattgcttggtttatggagtcttcctgagtgccacacctagtgccagaatatgaaggtgaagggtatgcttagggaactcacagtcttatagctgaggggagatgtatatataaaacaaatgattatgtgataagtattacattagagtttgtaagatgtaagatgggtttcggataccttaaaaaatccactagaagtaaggcatgtgcttggaaccatggcagaacagatggaagtatagcatcagatttggcaatcagacccgagttctaattctgaatattactgtttagctgtgtgactctagataaggcatttaacctctctgagtttttggtattaatatctcaaaataggccaggcacggtggctcatgcctgtaatcccagcactttgggaggccaaggctagcagatcgcttgaggccaggagtttgagaccagcctggccaacatggcaaaactccgtctttactaataataccaaaattagctgggatagtggtatgtgcctgtaatcccagctacttgggaggctgaggcaggataatctcttgaatttgggaggcggaggtagcagtgagccaagattgtgccactgcactccagcctgggcaacagagtgaggctctatctcaaaaaaaaaaaaaaaacaaaacctcaaaatatacttcatatgtttgttagggttaagattaaataaatacatataagaagtagctattgttgtgtttagtaaatatgtacatataatgtgtttagtatatttagcataaacgtataatctctgccacatcagttgctgagttgaaacctgcctttaaaagtccttggaaagttccggatagaaacaaggacagaacgaaatcccccggtcttttatctctaagaccaaatcctgaagccctccctgaaatcccctgtgccctcagtctttgcatcctcagagcattctcttaatgggcctcactcccatttacatgttatcctgtttgtgccgtctctcctctgcaagtactgtttctcggagggcagaatctgtgcctttcattcttgtgtcccctgcaatttaatggaagcacattaaatattagttgtagaaccagatgctgtagaaagggttcacatcctacaccccaagtcaggtggagcttacatgttatggtttttgaagagtttttttcacctcttccaaccatccttcccccactggttttttagacgttagcctttgacacccaaacttgagttttaacatagaagggccattgagcattttattcaaaaagatttttaatgaattatatcttgatatatgagtagtcctcattatgaattaacttaatcctcaggtctttcactgtgaggaaagatttatgttgatattttcccccaacttagaaaagcagaacaaaacctcagcaggcctatgtcttgtgtagccagggcaattcttaccagactgccacaggttagagaaaatgctgcccattcttttcctttcctgctcgtgcttagaggagggagcattctggcagggattctgggccagtgaaattggaataatactgtaaagaagttttggttgaagacaaggctaaatgaattaagggaaaggctagtttcttaataagtttctgagttcgtcctagaaagattggtagttaaaccatgttccatgtcaacctgaactgtctaaatagtaatcttgagaggtatggcagtgttattttttttctccttctggaaaatcagctaaacttgttagagtatgtgaaaatctactctcctagatttgaagagcaggattctttttggagggcagttacagagccacactaggtttctgctttttttttttttttttcttaaataggagattgctccctcttaagagagccaacgatttagaaaacttaatcacaggttcttcttccattcacacttaatctggtcattcagaggctcttgccctccccttcagaggctgcagcgcctgacctggggccacggaggtcttcctcctcaaccttcagaaggttcaaagggcaggagtgagtctgattctttggatagggggttgggttggatcttttaaaattaatttctgggtgtgaactgtaaaagagacgaaccagtagggatttactctcctccgtaatttactattgcagccagaagcctgatggtttcagcacccccacccagaaaaaaatttataaaatgaccaaaatgttacagaaatttatttcatggaggttgttcattttatggacagttgttccattttaagcactttgatcaccctcctgattccctttttttttcctccccctttttggacgtcagttctctggcatgtttagtgacagaagcaaaagggctgtaggaaatctttcttcatgtaaataagtacctatgtctctcctcatacttttattttcctctggcattaaaatgagaagagtagggtaggggacttggaaatcctatcactgcaaaaatggttggcttagatgccggtggtggtggtggcagccagggagggaaatcaagagtcctttgcatgtgcctgggtgcacctgcttgtttattagatgcgtggctgtaagtcatctggagtagtgcaaatttgtatttttattgatttgaattcagagaaggtttttggtcttaatttaactaatttatttatttttcattttagaaattcaatttcagcttcaccctaattgtcactactaaaatcctacatatgcaattctaagcttaccaaactgataaaataagatgactttattacttttattttttaaaatttctcgttttccttttctcttttccacttggctgaggacaaatatagataaaatcttggcctattgaagagccagtaaaatgttgttttatttttgtttctaacctgggatgttttatatctgcaaaatgtggtgaagacagacccattcattaaaaacagactgctcaactgggcaccatggctcacacctgtaatccgagcactttgggaggctgaggcgggtgggtcacttgaggcccaaagtcctcaagtgaccagcatggtgaaagcctgtctctactaaaaatacaaaaattagctgggcgtggtggcgcatgcctgtaatcccagctactcgggaggctgaggtgggagaatctcttgaacccgggaggtggaaggggaggctgaggtgggagaatctcttgaacccgggaggcggaggtcgcagtgagcagagatcgtgccattgcactccagcctgggcaacaagagctaaactctgtctcaaaaacaaaacaacaacaacaacaacaaaaacaaacacaaaccagactgcataagtcttcgacttctgaggtttagtctggaagaaatttctggtgccattttagttttgtcctgcacatgggatgtggttctttgatgcagtttcaggcctgaagccaaatgtgtacctctagcccggtgaacctctcacctgttttaggaaataattttgagcaaatcatactttctttgaggatctgaagtttctcaacaaagcttgtctgaagctatgtgatgtgacgcgatgccgatgcagagagcctggatgaggctgcacagatgtgcccaactgcctgatagcctgacttctctgaaaacctactaaaaccaacaggcggactgttctttttttggacaagaaaaaagacctggccctttcatatagcacatcaagccttggtagcaaccagaaactaagtgacaaatgcaagcttttagcccctttccttcttgtccctagaccttcatagttgtagcttgtcagtagaaagaactttggcctgggagttgggagactacctgggctccagattagctgagtgacctcgggcaagtctcttagtgtatcccaagatctttctccagagcgagagagtggaatttgattctctagcggtctcttaccctggaatcctgtatgattcttaggggtccgtgctacgtctgaggttagagatctcagatgtgaaagagactgtttgaggtgtccacttaagagctgcaaactctattgacccttgtgtctttcaactggaaaaatgagagcagcttctactcaaattaagaggtgccctcagattcccctatttagattctgtgaaccagtgataagtctcctcttctgtgtgattggtgttgcccttttgggatgtagacattttggactaaggatttagagatttttttaccgagacaggattgtatgcgtactaagatgtccttaaagctggtactttccccttttatcactaatggctgctatttccagagctgtgggctttatctgaccatcttgcaggtatgttgaaagatttgactagcacttaaaaggtatgttcagaaaatgctattttaagtgtttcttctttaccctatttcccccttgttgaacagtgcaaaactaccaggttttatgttccactgggcagctgctgctggtctgatgtttttctctctgtccctcctcctccttctgtctcccctcccccgggggtcctcccccagtgcctccccctgccccattcttgctccggtctgaagggagctgtacctttgtggttcttctgcagctgctggactttgatggggacatgcttgctgcctctacacttgcttcccttagcaaccgatcctttgacgatgacctcttgctgtttgcctgttgtctctcatgttggattatagatgagagatttaccaggctgggggtagaggcctgctgttagcacatttcttttagggttcccagcgtccctcagcctgtgttttctctctctaaaatatgaggtttggagagggtgcatgtgtgtttatgtgtggcggggatattagtgccgaatcaaacagttttaagttcatagggttgtcctagttgtgagctaattttgaagtagatgctgtggtggttactgaagctacttgatttacttctcatttttattataatgtgattaacacacatggggggggaggggtgccatttgttcctctttacactttccaagtgtttgtgtgttggcactaaacttgtttcctggtgtaatctgagctctgagaattgccaaattacctaaatctccacacattttaacacatttattttctcccaaagcattaagtttttgttttatttaaagtagcagtattcctggacatgtggctcttattttgcatggacagcttatgatgttccgtgtgtaactagtttgtgcatttctgtttagctcggtggatttgccttggacaaattagggacaaggacattgtgggacagcaagaattccaaaagaaccccggattaaggccaaaaaggaaaaaaaaaaaagccatttttaaagctacccaaagaggagagtctaaaataaaattagcaatcatttttataaaaagatacaagaaaatagatatttacacactgctggtggggagggtggcttgtagcagtacaatgtatcaagagtcttaaaaatactcataccccggctaggtgcagtggctcacacctgtaatcccagcactttgttttgtttgattatatagtctttgggggaacattttttttttctaagtcttcacagtttagaggagagctacttaaagatttcattatataaacttactactttggctgagtgcagtggctcacacctgtaatcctagcactttgggaggctgaggcgggcggatcacgaggtcaggagattgagaccatcctggctaacatggtgaaaccccgtctctactgaaaatatgaaaaatgccgggtgcggtggctcacgcctgtaatcccagcactctgggaggccgaggcaggtggatcatttgagctcaggagttcgagaccagcctggccaacatggcgaaaccctgtctctactaaaaatataaaaattagccgggcgtggtggcgcacgcctgtagtcccagctactcaggaggctgaggaaggagaatcacttgaacccaggaggcagaggttgcagtgagccaagattgtgccattgcactccagcctaggtgacaaagcgagactccatctcaaaaaaaaaaaaaaaaaaagattagcgggggtatggtggcacacacctgtagtcccagctactctggaggctgaggcaggagaattgcttgaactcaagaggtggaggttgcagtgagtcaagatcgtgccactgcaccccagcctgggcaacagagcgagactccgtctccaaataaataaataaataaataaataaataaataaataataataatactcatactccttgactcaacagtttttcttctaggagtttatccttaaaaaaagtttaagatgggctgcgtgcagtggcttatgcctgtaatcccagcactttgggaggctgaggtgggtggatcacttgagctcaagagctcaagaccagctagcaacagaatgagaccctgtctcaaaaaaaaaaaaaaagtcaaagatgtgtatctcaagacttacaggtaaggatgttcactaacatgttattcgtaatagaaaattactaacaatatctaacaataaagggctagctaaatgataatatttttgttcttatagtagagtactgtgcagacatctagattgtttgaggatacttaatgtcaggggaaaatgctcataagtgaaaaaagcagaatattaagcaatgtgtcatatgatcgtaatttaaaaagaaggaccgggcacggtggctcacacctgtaatcccagcacttggagaggccaaggagggtggatggcttgagcccaggagttcaagaccagcctgggcaacatggcaaaacccgtctctatttttttttttttttcttttttaagacggagtcttgctctgtggccaggctggagtgcagtggtgcgatcttggctcactgcaacctccacctctcgagtttaagcgattcttctgcctcagcctcctgagtagctgagactacaggggggcaccaccacgctgagctaatttttgtacttttagtagagacggggtttcaccatgttggccaggatggtctcgatctcttgacctcgtgatctgcccgcctcggcctcctgaagtgctgggattataggcatgagccactgtgcccggccccatctctatttaaaaaaaaagaattgtgtggcatacacagaaaaagaatgaaattctatccacaatctgtctctttggtaatgggatttttagtgctttcattttcttcatattccaagttcttcagtggtcaggtatcacagattgtgtatccttaatctgaaaatctgaaatttgaaatgcttcaaaatctgaaactgtttgagtgctgacatgctcaaaggcaatgctcattggagcatttcagattttcagattagggatgctcaactggtccgtataatgcaaatatttgaggatctggtcccaagcatttcggataagggacaccccagcctgtagttttataagttgagaaaacttttgttttaattgactcttcaccccccgaaaattattttgagaatattttgtctaaagctaaggacttaatagatgaaccaagacaatgacttttctctgtgtttcttcttgttgttgttagaatgtgtttgtgggtttgtgctttttaaaattaaagcccccttttttctttgtgtgagagatggctttggggtttttaagttgcagtgttatctgaaggaagttatatcgcttagcaggaactcagtacaataatgtgtcatccttctgtaatcatgtaatgatgcctgacttcaaaatgacttactagtatttgggaattggtgtttggactggttgtttatgagaaagtccaggtagaccgtccatttactaaatacggacgaatggcaagggacttgggagctttctgtttgatggtggttgaaatcactagttatggatgccatctttatttggaaatgtttgtaatttgggaagaatgagaagtgttagcagatgatggttctatgaacagtttgtctaggagcatcagagtgggaggagggtgttctggggactggggagtgggtttcatttgtgtttggcagtagctggtgatggctgttgatagttgaaagatctatggtctctgttgaggagtacttgaccatgaggttggttgagtgaggaggtgagtagctatgagatcacaacctgacaggccttacgcttcctcagccttcactgtcaacaattgcttgggaaacctgtaagaatggggagaagagaaatatagcagccatatcttgggcaggtattgagagggtagttcaaaatgttggaatatgggtaaaactagaatgctgcacttctattgggctcatcatttgggagagactagtgagggtagagttggttctcttaagttggtttagtcttttaacactttattttgaatcctttaaataagcacatatgggaatgcacaggtagatagaattttcttccactgataacttgctatcagccatgtattactgagtagtatttcattgtgtggatataccacattttatgtatccactcttcagtcagtaggcatttgggttgttttcactctgtttattatgaacaatgctgctatgaatgttcatgtacagcttatggacatgttttcatttctcttgggtatatacttaggagcggaattgctgggtcatatttgccactctgtttcatgtcttgaggaattgccagactgttttccaacatatctataccattttacatttcccatcagtagtgtatgaggattctaatttctccataccctctctaatacttgttattatttatattctttttattatggccatcctatattagcaggtatgaagtgatatctcattgtggttttggtttgcacttccctcatgcctaatgacgttgagcatcttttcatgtacttattggccattcatataccttctttggagaaatgcctgtttagatcatttgtccatttcaattgggttactcattttgttattgaatcataagggtagttacacttttaaagtgttggatcacaaagagatttgccatctgagaagttagaatcaaacatttaaaattcatttaagaatggttaaaaacacattacatgttaacaaaaataacttttttttttgagatggagtattgctctgtcaccaggttggagtgcagtggcgtgatctcgactcactgcaatctccgcctcctgggtccaagtgattctcctgcctcagcctaccaagtagctgggactacaggcgtgtgccaccacacccagctaatttttgtatttttagtagagacggggtttcaccgtgttggtcaggatggtctcaatctcttgaccttctgatccgcccaccttggcctcccaaagtgctgggattacaggtgtgagccactgcgcctggctacaaataacgttttttatttaaaaaaaaatttttttaaaaaagatgtggtcctgctctgtcgcctagactggagtgcagtggcacaatcatagctccatgcagccttgaattcctgggctcaagtgatcctgctgccttagcctcccaagtagctgggactacaggcatgtgccaccatgcctggctatttaaaaaaaatttttgtagagaccgagtcttgctttgctgcctagggtggtctcgaactcttggcttcaagtgatcctcccaccttggcctcccaaagtgctgggattacaggtgttggcccagcaagcctggcctaaaatatctttttgttttagaaaatatagtgagaaaaatggccttgttttatatatttgcaaatctctttaatgcctggcttagtaagacagttggattcttgcatccacttccgtacctagtctgttgcaatatgctttggttgaagtataactaagaaaatctagccttacacagatatgtagttggaaaagggaggagtattttatagcctgttaagatattagtaattatgagtattctttgatactatatctaaactggacaagaggtagtttctgaaagattagttgcaatgtagaatctgaaaccatgtcaatgaactattcctactgtttcactttgaaatctattggtctctgttgcattttgaatggatcttttactaatgaatgattttgtattatcatctcatgcattggtcatttagaaaatattgattcacttagtcatgtagctcttccaaatactaacatttcattatacagtacttaaaaattcacatttaattaattaattaattatttttgaggtggagtttcgctcctgttgcccaggctggagtgcaatggcgtgatctcggctcactgcaacctctgccttccgggttcaatcaattctcttgcctcaccctcatgagtagctggaattacaggcacgcgccaccacgcccagctaattttgtatttttagtagagacgggtttcaccatgttggtcaggctggtctcgaactcctgacctcaggtgatccatctgcctcggcttcccaaagtgctgggattacaggtgtgagccacagcacccagcctatttatttatttttgagtcagggtctgactctgttgcccaggctggaaggcagtggcatgagctaggctcactgcagcctctacctcctagactcaagtgatccttccacctcagcctccaagtgtctagggctttagctgcatgccactgtgaccagctatatttttttattttttttttatactgatggggtttcaccatgttgcccaggctggtctcaaaactcctgagctcaagcaatctttccaccttgaccccacaaagtgctgggattaagcgtgcaccactgtgcccggccaaaaattcacatttgttcccaacagaaaagtctctaagtatcaggattctgtcagactcatagtgataggtacacatttcccaaaagtttaatttttgcttgagagttcaagttttatcattggcaaaaaatattatcaattgtttccttgaagtgttagtctcatttcattcctttttgagaaaatgcctgccctgcactcatctatataactgtactttaaggtcagttactcgtttaagtaaaaatggtgttccgtgaaaaaagttgactagtttggcttacagctaacaatcacacaagtattttgtcttgaggcaaccactgtgctttggtatgcagcagaagtgctttatgcgtatttaaccatttcgccacgcagaattttttttttaatgtactcaagggttgagatttaataaacttaatagtttttattgcttcatctgcattgcttcatcaacattcttaaggaaacttttatttcaattccaagtatacaatgatcaagagtgcagtttggtgtcactgctgtaattcttgcaacagtttttcccaccactgcttttgtacatgaatcagtgcaaatgtcagcagactgtaaaaggctaataatgtctttgtgttattacaaaaatggttttgccctcacagattacctgaaaaggttgaaggacaaacctccacccaccgccccctgccctgggcttgcagatgggatgagaaccactgggctagacagcatttaatggaaatggggataaaattgttttgaaggtgcttgctgctctgttgtctgagactggtagcataaacttgcatggtgatagcagcaaaatgtgtatagtgttgtgtaccttgttgcgttgttctttccagtctttagcaatatgcaaaatcacaaagcactaaccactgagactcctttgaaaataaactgcttcctcattttcttcttcctttcctttcctttctaacaagaaaagcacctcttcaccacctaccttgcaaatgtgctgtttcccttatttcatgttttgagttttaaaaagacagtggctctttagggccttcctccatatctctgtttctgaggatactccttatacttagaacgcttgactgatgtctagttcaggcccaggccagtggctggcaatgacctcattcttgccatgtaaatccttactgaatggcatgagactccaacttagcagttcatggaattgtaaggtgagcccagtttcccagccaattatgactccatctaaagccgtagctgggccattaatgtattttgcgccttgtcctcttttatatcttgccaaactctgagagtctactgtatagctactggcaacaggcctctgccaaaacagtctatgaatgtatcattttacacctcatttttccttgtttccccctgtgatggcaccttgcctgtgtttctctctcccacatctttctacccacttaaaaaaattattcatttaacttattcctttattgtggtattatagacttttggcttctgtagttatttagtgtgaaagagatactgaagaatgaaaatgctaatatcttcttatagcgcccttcctttttcaaccactagtggttctcctaagggccctcttctgggttgaattgtgtccccccaaatttatatgttgaaaccctaactcccagcacctcagaatgcgaccttttttggagattgagtctttacggaggtaatcaagttcaattaaggtcgtcagggtgggccctaatccaatatgactggtgtccttattaaaaggggaaatctggacatatgcacacacaccaggaacgtgccaagtgaagatggaggcagtgattggggtgatgattccacaagccaagaaacaccaaagactgccagcagcccaccagaagctaggggagaggtgtggaacagattccctcatagcccccataaggaatcaaccctgtcgacatcttgattttggacttctagtctcaactgcaagatgacaaatttcttttttacccagtttatggtagttcgttaaggcagccctgggaaatgaataccaactcaaagctgactgctgtctcccatggccctgtggttctcttgctcaccttggacctttgttctacaggtcacaccacggctggtctcccagggtgacctgtgcgcctgccatgtaaggttcctcctcagagcagtgctctgtgactgctcacgctaatgaagaatgcaaggttgaggactgtgttttctggaaagatggatagagatggtttagggactcagagataggcgactccatgtacctgctcccatcccgtttgcatgtacctcttcccctgtgttgatgagaggtattaaaatcctgctggcctccacttgctcctcttccccgtggagcaaggagcactgagccagcatgggtatatctggctttcttttctccgagtgcattctccatgggaccctcctgcgggttcccagctgaccgctggtttgcaccacacagccaggagaagtggccaagaaaagcgagctgctggatggaatgctcagggccccaaaacattactcttcgtgatagtttggttcttgccaggatgtccttgtaaaacttttatgaagatgttgttgtacttgcattggaggttgaaaattgctgttaaccttgctaagtcccatgtcccccaggaatgtggaacgctatggaaatgctctggccctcccttctggacgggtgctccactgcagcagctgcctgcacagaaagttgagctggctggctggattaagggacatcagctaggcctttgtttaaaaatatttaaaatatgtttgaacctccctttatcaacaaagaacagtttctttcagcagagagaagtttttcatttccatgttttttttttttttttaaccattttgtttggttcttttgtatattagcaactttggaaaagtgttcccattcacagtttgaaagccaagtataaaaggtattgcatcgttattttctattttgcttaagagaaaagagcagtttgcttctattaagaacataatgtttatgaagataatcttctggcttgagttaatttttttctggtgtcgagctttgacagttaaaaagcaagaatgtgtttgcgaatgtatttaaaacatctctggaattaggagtttatgaaggtatattaggtaatgagaatgagctttggaagttacaaagaaataaaagaggttcctgtgtctgagtctgctggtatgagagccaggagtattaacctatggagagtccttgactattaggtcttttgagttaagtttcaggataaggcagcatttttctaaaatccaggttttcccttgcctgcctttgtgatgatcacagtgtgtatcaggtttctgcttaacttcagatcttctttgggtatcttcccagtgttattagaaacctgagatatttccctacttacttgcaggaggagccagcatgttgcataactgcaggggccccattcatcttagagtgtggattagaccagggtgtcaagggccctaggcagcgtgcagtgctatgtgcaggtgctagcagggaaggcatggtaggtgaaggttcctgtttcttgggtgcattaatatggaattacttttcaaaacgtatcctagccatacccttgttattccatgtttttaaaccagatcattcatcttgaggagtactcggccaactctaggtacggcttttcctccagcccctcagccactgcttgacagagttgtgaggccacagcctgtgagaaatcaatctggagaattattagttgtctcttaagttgctttaaaatcgcctggaggccaaccctgaagtttaggaaaagagtgtgcttgtgtttctcctgttgacttctttctcctccaagtgttcttgtccttcagttgactctggagactggaatatgagtaaagaacatgaaagggactttagttaaacattagaacctttcaagtttcagggcttcaactgagcttagtgacatgccatcaacgaccaaggttcccatatatcctgaaaggatatttctctaaggccagttaggcatcaatcattaatcagacactttacaaatggtacttatattaggttgaatcttatgaccttgccatttttgtagatcagaaattgttggatattggcagtttcccatggttttacctggagtactctggagaggccatgtagcattgtgcttcagaatagggacctgggacctgtgggccttgtgctaggctggaattttcaccttggcacttatttgtatgtgacactggacaggtcacccactgccattgactgccattgattgctctgaaaatggggcgattgtggttccacaccatagggttgtttttaagattaaatatgtccatgtatataaagcacctaggacagggcctggcacacggctcactctgtgtgtgttttttttcatgacttcttcattcttaggaccttcacagtttctgccatatctgcgtgccagctgtgtagtcattgtcttggtcagcacaggctgctgtaacaaaataccatggactgtgtggttaaacagacatttatttctcatagttctaggtgctggaagtctgagatcagggtgccagcatggtcgggttctggtgagggccctcttcctggctcacagagctgtcttcttgctgtatcctcctgtggcgaagaaagtgtgagtgagtgagcaagctctctggcatctcttcttagaagggtactaatctcatcatgatggccctgccctcaggaccttatctaatcttaattacctcccaaagaccccacgcatctccaagtgcatattgggggagttagggcttcaaaatatgacttttggggagacccaattcagtccacagcagtcatttatttagtgtttttctttaaaagtgacagtttttaaaacaggaataacttatcttgttgattcttggatgcttttcttgtttttgtatatcatctctgaaattagaatgtcttttttttttgagtcactctgttgaccaggctggagtgcagtccatgaccatggctcaccacagcctctacctcctgggctctagcaatcctcctgagtagctgggactacaggtgtgtgccaccatgcccaactaatttttgtatgttttatagagacagggtttcaccgtgttgcccaggctggccttgaattcctgggctcaagggattctcccaccttgtcctcccacagtgctgggattacaggcgtgagccaccatatgctgggcactgtgggataatatcttaaaatctgtgaaatgtcctggtttaatttttttcttgtccactaaaagatataatggctgatggcatcacaggtttggtggaaaatggtatttttggtgtttttttttttttgttttttttttttgagacaaggtcttgttctgtcgcccaggctggagtacagtggtgcaatcatggctcactgcagctttgacctcctgggctcaaatgatcctcctgcctcaccctctggagtagctgggtctacaggcacgtgccaccacacccagctaattttttaaaatgttttgtagcgatggagtcttggtgtgttgcccaggctggccttgaactcctgggatcactcaagtgatcctccttcaccagccttccaaaatgctgggattatggggatgagccaccatgctgagcccctttaaaatggtagttttttaaaggaaatattatcaagagtttgtgctagttatgtttttccaacccatgttaaaatgaataaatgtctgttgttttaaaaagtcctcctgtgtaccaccttgcagcctctgtggatcagcagtggactcctggcctaccctctgggaaacatgaatgtggtgtatagtttttggatcatgttttgtggagcagcatcctcactcagcatagctgtgctttggttggtctcacgcactgaagtgttacttaaggtttggattatgggaaggacttttactactaaagacgttggaaaaccatatgttttgggaggctgaggtgggaggatcacctgagcccaggagttcaagaccaacctgggcaacatagcgagaccctgtctctattaaaaaaaaaaaaaagagccaggcatggtggctcgtgcctgtggttccagctacttgggaggcctaggtgggatgatcacttgaacccaggaggtccgggctgcagtgagccaggttcacatcactgtactctggcctagatgacagagtgagaccttgtctcaaaagaaaaccacatcagtaagccatcttctcgtttgcctcactaacatcctgttgaggtgtcccacaaaccaaacaggatgtgggggtgcggaggattatcccctctaggagcaagttgccccatctggttgagggagaggtggttctgtcaccagtagagcatgttgagtgctgcagagatggctggcgacggggatgtctggcctggcagatgtcaccttcaaggagggagtgtgctcattgcaggctgctttctgggatgggagtaggctagtaatgtgatgtgtggggccttccctgaaatagaaggcactggacaggcatgtagtatggataaggtagagagggtgatggatagttttggctttccttgtgaggtgggcatgctggtggcatgttttagattttccgaatggcctttgtttccatttccttttttttttttttttttttttttaaagctgcatccttttgcatcgaatgaaaccccatcaagggcatctcctaactcttcttccattctcttgtccagggctggtgttttttgtgtgtttgtgactgacaatgcagcatggagaatttggagaagctagttttgccttttctcctacaggaagagggactcgtctgcaaagaaaggggtctgcctttcagtcctttgaagccacctggtctgacaaagacagtttccctgtccctttttggaccttgagctgagcaaaaaattacttagttgctgaaagcaggtcagtgtagaggacttcctctactcctgctttgacttcatctgcaagagagctgagaactgagtgaggcatttctgcttcttgagacttctcttggtgtggcagggcttcctgtccaggaggggctccattgcctcatgccctgggtataaacagtcccagagggctttggaatcagcctgggtcaattctggaggaaaaataaggcctaataagcatggctcttttcccaaaatgtagccacaggggtctaagcagctgattgtggggtccagggccaccaggagtcttggctggcctagcatatcttgatttgttaagaaggtggatatgaattcagtctagagaagataacgtgcctattgtgcagaatgcagggctttttgttcaaggctgtctccatttggaagtagaatgacaaagcagtgtagatttacacagagcatctctgagtctgttacaacccttaagttttatggtttcgagccaggacagtacttcttacattctgtctttgtcaagggcttttgtagtcctgagattttactgtggtgcactggttatgagatgagactcatagttacaaaattccaaactgaggattatcatctagaaccactccacagttggatccttggcctcactcttcactgtgtcactcacagcacctgtcacaatgcatgtatgttacccagagggtgcccagtaaatttactgaacgagtttctaaacttccaaattgctttctgattggataataatgacagtttttgttttgttttgttttgtttgagacagagtctcgccctgtcgcccaggctggagtgcaatggcatgatcttggctcactgcaacctccgccttccaggttcaagcaattctcctgccccagcctcccaagtagctgggactacaggcacacaccaccatgtccagctaattttttgtatctttagtagagacggggtttcaccatgttggccaggctggtctcaaactcctggccttgtgatccgctcgcctcggcctcccaaagtgccaggattacaggtgtgagccaccacgcccggccaatgactgttctttttgagaccttggacattacactgaatccagtgaagtttcttgagactgtaccgtgattaggggtgggaaataaatgttgtgtgcagttttggatctggagaactttgtgggagtgaagagccaagaaggatgctttgaaaagcataactcttgctgggcgcggtggttcaagcctgtaatcaatcagcactttgggaggccgaggcgggcggatcacaaggtcaggagatcgagaccatcctggctaacacggtgaaaccccgtctctactaaaaatacaaaaaaattagccgggcgttgtggcttgtgcctgtagtcccagctactcgggaggctgaggcaggagaatggcgtgaacccaggaggcagagtttgcagtgagctgagattgcgccactgcatgccagcctgggcaacagagcgagactccgtctcaaaagaaaagcataactcttctcttctgtccacttgttaataacagctaaggttgcaattcatggaacaatgagttttgtcttttctgaaacttagtaaccacttggtctatcaacaactatttgagtagtccactgggcaggcaataaagcagtgatcagtagatttggagatggataaaacagttggttttctctcactcccctcctttaggggagggaaaggtatatgatacagtgattaagagcattaactgaggtggcgggcggtgttagagtgtctttttgaacatgggtccagctgactgtttctttgggtctatgacctcctgagcccaggttccttatcatcccatggggcagtaatcactctcctgcccacctcacagggaggaagtggatgtgacctgaattatgagttgtaaagaccgaacactggaaatgattgccactgacggagagagggtataagagtggcccttttggagtacagaggacaccaggagcctcaggctcatgactggcctcatttggttctcctcccctccttgtgtaccaatcacccaaggaaggtgattcattagacttcattagacatacttcccagttcagcttctgtcttagctcagagtaaacaagtgactctctgttcagaaccgaatgaattgcatctggtacttttagtccttgcgtcttacagcaaagattaaatggtactctggaggcttggcaagatgagactcacttcatcagcagagaagaatggagtcacttgggagggagcacccgttctggtatgaaatttctcctgatcacaagtgcttgtgaaaattaaccttttgcatactctcatccttctcaaggaaaggctgaattgcttctcaagttttgtcctgcagccttgggtgagaattctggttttgttgcaaagctagagctcagaaacaagaaagtacaaggccatttttcttggaggaagaaggcaggcagctcagcttgcatgagcatctgacccagcagcccatggctccctttgtgggaagtgtccccttagctgtggaacccaggtgggtaggtgaacacctcaccttatgactgccacaccttatgactgcccattagctgctgcgcctcctctcctccttctcttttcttctgtctttctggaggaatagtctagttcgggttggagatgaacctctggcctgggaagacctctttcaaataagattatgcccatctgtggcttaagaagttactcattcaccaaggcacatgcttgtgtctagaagtaataccatcatgttaccacagtaatattaagtagaacatacacaagtgccatttttgtaaataaaatcaggaaactagccatttcatatggtaattcccagtaactcttgagaatcttgagttgtgatttctgtcatgtagacaagtatgatggaccgaatattcatttcatttctctaccaaattcttgtgttgaagccctaactcccacggtggtggtatttggtgatggggtctatgggaggcagttagggttagatgaggtcaagagggtgggaccttcacagtgggcttagtgcccttataaaaagggacaccagggagcttgctctctctttctccccttgtatgcacaaagaacaggtcatgtgagcatgcagggaaatggtggccaccacaagctaagagaagaggcctcagagtgaaacctgcctcagtggcaccttgatcttggacttcccagctccagaactgtgagaaaataagtttctgttgtttaagcctcccagtctagggtactttgttatgatagcctgagcagactgagatacttagttcagatagaaagtgagaagctaatttgaatatgttctttatctgttcttggcctgttttctttggtctgggcaagtcattttcaaggtgttctgtgaagttcatcttcatcagaatcacctgggaagcatgttaaaaaaccagagtctgggtcccaaccccagagattctgatgggagttatatgtgtggctggactgtgcatttttcgtttatgtttttttctttgagataaactttacatggagtgaaatgtacaaatcctaagtgtactgtctcatgggtttttaataaatgagtccctttgtgagacccaacccctgtcaagatagagaacaacatgaccatcagcccagaaagttccctggtgtcccttcccaatcagtccccactggggatcttcagtggcatcccagagctgtttgctatggtggcagtagctggagagctactgttaattaatttgagcaacagtgcagctgataaatttgatctagcagggaggtctgggactgccatcctgaactcaaggttctcaaatcctgtagctcttgggtcatattgataggggctatatttttaaaaagggatagttgggcagctggttggaaggaaatggcaatgagttcatctttgggcctgtttactgcccccttttgaaactgggtcgtttccagttccgagtggggaggctgcattgttgttctgagtctcagattggagcccattacctgccaggctcctgctcattcttacttcctcttggagggatccccagcaattccaattccactagtagggtttcccagccgatcactcttccctggctgttctcagtcattctaagtgtagaagctacatcatccttggcttctgcctagtggctcacttaaccacatcatctcaatttatcatgttgctgtttatctttttaacataaagttttattatgtgacatactatctcagtctgttccttttgctctaacaaaatacctgaaactgggtgattcataaaagaaatttatttctcacagttgaggaggctggaaagtccaagatcaaggtgccagcagatttggtttctgctgaaggctcactttctccttccaagatggcacaaaagggtcaactcttcttcaagaccttttataagggcactaatctgttcatgagggaagagcccacactgtctaatcacctcccaaggccccccacctcttaataccatcaccttgggggttaagttccaaagtgcattttggagggccatatacattcaaaccatagcacatgcattatctcatttaatccagagctattggttgacatcccatcccattgggacaagaacacacatgtgatagttgagcttaaagtgtcaaaatatggacagtattcagaggaaacagtgatagtgagctggagggttctagaaagatcatgtggaggcaatggggcaagagctggaccatgaagaatggatggggcagaagatgggcaggcaggagaatgggggataaggacctcctagtgacttaggtgaatttagtatgacatcttggttttattaaataagtagcatttgatactctttagtctactttaccttttccttccaacaactctgtgaattagaaagggcagatggttaaatctatttattgttgagaaatggaggtccagaggggaaaaaaatgctttacccaagacacacagtgaaattaatggcagcctgagcttctcaccgttgctatttgagtttctccatgttacttgaccacccactggtatctgaccccaaaagaccttccttgctgacttcctgtggtattttattttgttttgcacagcatggtactgctattaaaaactaaatcttttaaaaacaacatttcctcagtagcatcaaacatatgtctttatcttcttgattcaagctggtcctgactttaagatatcttgaggagaatagggtaagaatacatgtggactttcttccttgagaatatagggaagtattagatttcagagtctgaggttaacacagtggtcaccagcctaatgtggctatttaaatttgagttaattaagtaaaacttaaaattcagttctcggtttgcatttaccgcatcccaactgctcaatagcaacatgtggcttgtagctcctacattgctggtatagaaacagaacattgccattattgcagaatgttctgttggacagcactagcctaaagctgctgtctcagctaagtgacttctctgtaacctctgactctctgtaacttctaacttgtaacttctgtgtaacctttgaccttacaaggtaggcttggagtgcagaggggtgcaatgaagttgtctgtgatacttatgcttatctcaggccatactgtaatgttctctgggtcagctctccaaaaggcacaagcagtcacttgtttttcacagagagagaacccctgattctagctattatactgactctcgtagaggtgctacaggcaggccatgataggatctggagccactgtgttatcatttcttccatagttatagatggagtgctccatgtgtcattagtcatttacactgttgtgtgtgtcagcctcaatgtctacccatgaggatacatgcctgtatttggggaggtatgcaggggaggacagctgcagcccaaaaagctcctatatgaaggaatgagctgccatactgatgcctccattcttaagaatgttctgtgttgtggttgctggtctctggctgaaatttggtacgtacattctttagtttgcaagaataaaaggctcagtgcagtgttataggcaggggtctgctcttagttcaaatgcattgaaggaagccgttttatgcacagtggcttgtaccctgaacatccttttggaaagactaaacaaagagggttattttgtgacttcaccatatacatggcctgaatggatggtaagactgttgaatggaaggttgggtagattagagtgtgctaccaaaggcaaaagggctctggccaggggcccaatactactgtgaacaggatgcaaatgatggtggtctcacaggagacacactaaacggggagttgggtgggactggagctaaccccatttaaggtcctcaagaccatgtaatgaagcaggaaacccaacacacagagtgcatgaaagcaggacacagagatgaatcctgaatgggcagagggccccagagagggagacagtgacttgggttctttaagggctcacaggctatagccacaggctacagattcacctcattgcatcccctgcttctctgtaattgccctggtgagtttccaaatgaagggaaagagccaatagccctttaggaagagatgcactagatgaaaatcacctgattaaaatattgctgttaatcgcaggagaggggggtagggagggaaaaaaaccacaggctcaagcgttaaaagcaataaattatttgttaggctttgccacccagtatgaccttgggcaagtggcataagggccccattctctctgatcctggagcagggggaatgcctgccacctgcctacctcttgggggttttgggaggattaatgacataatgtctgagctgtgctttgggctccttggagacagccactatgtatcaggaattattagcacaagctaggacagtttcttgactattctttacctcattaagctacctatgcctgattacatctgcttataaaagttgctgctcaaagaagagtggactgggaaggtcataacccaggctggatctgtcctggttggtttcattaaagccactccctaaacccacactcatcagcaacagggcaccttgaaagcttagcacagtacccagcatctaatgccagagacggatggttaaaaagaaaagaaagaagaagatcctgtggactttttgcacttctgtgttttgtgttactactaccaacccacctacattctagtgcacctaggggagtgactgccaggttgccggggatgagggacaagctccaggagtcttcagctactcagtttttagaatgagtagctgtcagatggatggacaggttttttcagtgtcaaattttgaggcaaccgactaaagaaaccaggcggctctaagttcacataccaagaaacctatattgattgtgtttctaagtgagggcaagtccatgttgtatgaatgtgtattatgtgtaaaagacacaaaaaagtatattcagtgtgggtctctatcctcaaaggtcttcatccagttggataaatttgacatttattcctagaaagctcaccagccttgatatagaccaggggagaagtcagattaggggatcaaagcacttcaggtcaaaggattcagaggctgagcctgggccaggggcagaggggtgaggggaacaactcagccacaacatcctcgagtgtatccagaggccatgcagacagaggcttgaaccacagttcacaggaggctttcaggtacctgtgatcctcctggaacaggagaggacaggaagatcctaaggtacacttcaaggccatctcccacccacctcctatctcttgggaggctgtcgtgagacagtgtctcatcacccctcaggttctgatgaggatgaacttctgtactccagccccctcagaatagagctgcagaaggtaaagctgcttagctacagtctcaagtggactcctcagcaacagggcatcccgcagctcacgctgcggtcatctggccccttctgttccaaggtcataatttttggtatgaaggacaaagccgtggggagctggcacctttggctactctttcttttgctgtctatgtaagtaataaactgcctgaatccaaaagtggcttgtgatacctttaccagccgaattagtaaggtcttggccttgccttgtctcgtatgcttgaaaagagggtgtgcccaactctcacctcaactgcgccaaagctttaggccaaaaggatagagctggttcccagggcctgtcaaaagagaagggagcaggaccgagggcaaccagcaaagctttagacccatgcagaccagtgccacctggctcagccatcctagcacagctggaattctttccatctttgttgcatcagccacacacgaggacactaatactgacattataaggttgttgttaagattggagataatgtatgttatacttccatagccgtccccgacacaactactaaaacagaaaataacagccactaacatttactatgtgcttgcctcgttccaggcactgttctgctagttttataggctaactcatctgacccttacaactacctttgaagtagatattctttttttatgtagatgaggaagccaagttcagaaatttgctcaaggtcacatacaagttagtggcagagctgggatttaaacccaggcaggctgtgagcctgggttcttaaccaccctgcctcagtggacatcagccacgttcccacactttgctgctgaaaagaaagtaacattttatccagtctaagtgctgagaacagttctggtctcctatatcttagtatcaggttgagcctgagtagaaggaaacaacaagacagaagggctggcagggatctagatagagaagactctgaaagtgatgagtgatctggtttgcaggtggtagaatatgtacttggtttgtagttaaggagaaggacaaacttcaaaagctgtctcataagtcaaaggccccaatttaggaatacgcaagtgttggtaatacatttagccaaatgctggacagaataagctagatgtgacagtggacatgaaaatgccaaattcagaatggtggtcacattttgtaggaagagagagagaaatactatttttcaggctagtatttgatgtattgttactgttttatacctcaaccccttgatttcttgaaacagtgtaaacttggtgactttactgcataataaatccacccattgcacctacattgcaagcaaactccacccactccataaattggtgattttcccgctgcatctcctgtctactttcagatagttttcctaaagccctgactggcaaaagcctaattccgccctctgcaaagatctcaggtccttgtctaacgaaaggggaaaaacattaaaaatgaaatgtttgaaatgcaacagagtgaacagagtgaaaactactgcctatagtcatgtgtcgcataatgacgtttcagtcaacaacagactgcatatacaacagtggttccgtaaagattataatggaactgaaaaatttctatcactcagtatttactgtattttttatgttagtgtactcttctacttattaaaaaagaagttagctgtaaaatagtcccaggcaggtccttcaggaggtattcgagaataaagcattattatcataggagatgacagctcatgtgtgttactgcgactaaagaccttccagtgggacaagatggacacagaagacagtgacattgatgatcctgacattgtgtaggcctaggctaatgtgtgtgtcttaatttttaacaaaaaaagtttaaaaaagtaaaaaaaaaagttttgatagaaaaaagcttatgaaataaggatataaagaaatttttttacagctgtacaatgtgtttcttattagagtgttattacaaaagtcaaaagttaaaattaagtttataaagtaaaaaagttacagtaagctaaggttaatttattattgaagaaaggaaagtattttttataaatttagtgtagcctaagttacaggcacatagttttaaaaatcttttttttttttttttttttttgagatggagtctcgctctgttgcccaggctggagtgcagtagtgcagtggcataatctcggctcactgcaacctctgcctcctgggttcaagtgattcttctgcctcagcctcctgagtagctgggattacaggtgcctgtcaccacgcccatctaattttttcgtatttttagtagaaacggggtttcaccatgttggctaggctggtctcgaactcctgacctcaggtgatccacccaccttggcctcccagagtgctgggattacaggcgtgagccactgcacccagcctaaaaatcttttataccatattttttactgtaccttttctatgtttagatatgtttaaatacacagatatttaccatggtgttacagttgactacagtacagtaacatgctgtacaagtttgtagcctcagagtcataggctatactgtacagcctaggtgtgtagtacgctattgcatccaggtttgtgtcaccacactcttatgtttgcacagtgacaaaatcgcctaatatttctcagaacatgacccctgtcatgaggtgacacgtaactgtatttaggattaaggctttcagtgaagtagaaccgtggacagaaaagaaaagactacctttgaattgttactccttcacagatcatctgtcttctctgttagttttggaaacttgttttatcctgtattgggctgtttcactgcgacatacctaggggtgaatttatggatttaatatatcctgttgaggctgggtgcggtggctgatgcttgtaatcccagcactttgggaggctgaggtgggtggatcacttgagcccaggagttcaagaccagcctagacaacatagtgaaacccatctctacaaaaaaacaaaaactagccaggcataatgacacacacctgtagtcccagctactcaggtggctgaggcaggaggatcgcttgagcccaggggggttgaggctacagtgagctgaggtcgcaccactacactccagcctaggtgacagagtgacaccgtgtctcaaaaaaaaaaaaaaaaaagaaaaaaacacaactatatatatagtggagcaaagccctctgtttttgatctgaaaacttatgtcttatttcacttctggaaagttcacagccttcatctttctgaatagggttggtctgccaccactccaacacccttcccctggatagctatcaaagctgtgttagaggcttaggtctgccctctgtgtcactaactactatttttcttcttcctctactgcattctgggtgacttcctcagcatgtcttccagttcactaatcctatctccatctttgtccagtttggattatcatttaaaatttaatttcaatgtctgtttttcatttctagcatatatacattattcttttttaaaaatatccatgtattatttcctttctgcctgttgtgttttatatttccttattctttcttatagctataattcctttttgcatctcccataattcctaaaacatacatttaaaagtcattgtcaggctgagtatggtggctcaaacctgtaatcccagcactttgggaggctgaggcgggtggatcacctgaggttaggagttcaagaccagtctggccaacatggtgaaaccctgtctctactaaaaatacaaaattagccgggcatggtggcacacgcctgtaatcccagcgacttgggaggctgaggcaggagaatggcttgaacccgggaggcggaggttgccgtgagctgagattgtaccattgcactccagcctgggcgataagagtgaaactccgtctccaaaaaaataaagtcattgtcagactgccctattttcatttaatctcaaataaattaaccccccagtgtcgattttgttggctgtcttcttgagttagttttcttttggtattttggaaattgggtttggaaactcacggagtcagagttcgtttggaggaaatggtcttctctgtgccatccctcccccaacagccttgtgtttacttctccaaggacctgtaagcctataacaggtctcatagtgacatgtcaggaccaccaggacatacagacacagataaacttcagtcttcatacctccatgtggtcttggcccacatgcaggctgtagattgtacatgcttcttcgtaacatcctaggcttcactgtgagctgtaattgtcagatgttttcagtctcctttcatagctggggcagcctagcccaaactttggttttaagtaaggacagtggctcccatcccgccccacttgggctacttttagttcccagtccaccagaatagagctcccagcaccaccacctacattcagactcaaagcacagcgggactgtggcttcagcattcatctttgctttattctgttctgttctttttttcccccgtagatatgtttatcttgtttttaagcataatttacacctttcattttctttttgtatttgatgtttggaatggaggggagggaaactgaatcaaaaataaacttatacactgagcagaaggtgatatgtaaaggaggttaaggacagagtcaagcctagtgagggtagattattccaggcagagggaacaagagcaagtgcaaaaaacctatggtaggtaggcctggcatgtgggaggaacagcagggaggccagtgtggctggaacagggtgaacaagaaagagactggcagaagagaggggtcaaaggtcatggcaggtcagacacaggattttccagggcttcataagtcagctaggaagccagtggtaacttgcacagagtagtaacatggcatgacttatattttaacaggattgctctggctgctgtatttgagaaaagactggggaaggggcagtgtcagggagtggaagagttgagggagagcagttaggagctctggcagtaacccagaggagaagtgaagggggcttggtacagggtggaagcaggggaggtgctggaaagtggttgggttctgaataggttttgtaggtaaagtcggcagaatttgctgaagggttggatgtgggtaggggagaaaggaagcaaggatgactccaaggaatgaaatgccattacttgagaagaggaacatgacagaaaaggtttgttttggaggaagctcagttttaaacaatgaaatgaaaattagcccttcttacccgactacaaagatatgataattactgtaagattcaaaagaagactgaagactgttactcagaatatagaaagaactctgaaaattcaataagtacacaacccaattaaaagcaggtaaaagatttgaatagagactttacaaagaagagatagggatggcaaataaacacatgaaaagttgctcagcaacatcgggcatcagtaaatgcaaaataaaaccacaatgagatactgctacgtgccactagaatggctaaaattaaaaggctgatactaaaaagtgtcagtgaggaagtggaacaatgggaacccatacattgcttttggtaatccaaaatggcacagttccttcggaaaagtttggagtttcttataaagctcaacatacacctaccatgtgacccaggtattccacccgtaggtatttacacaagagaaataaaaacatttgtctacgcaaacctactcaaatatccgtggcagctttatttgtaatagtgaaaaagtggaaacaatccaatgtccatcaacagatgagtgaatgaaaagtggttcacccatacagtggaccactactctgcaataagcagcaaaacactgacacatggatgaacctcaagaacataatgctgaatcaaaggatccagggttcttcccttccccccaaaaaagagtgcatgatacatcatgtttccgtttatgtggaattccagaaaatataaaccaacttatatagtaacagaaatcagatcggtgatagtctgggtatggggtggaagaagaaatggactatcagggaacaagaaactttctggggtgatgaaaatgctctgtatcttgatagtggtggtggtttcacagatgtctgcacctgtcaaaactcactacacattgttatcagtaaatgattagtttattgtatataaacacctcaattaagtctgtgtttgttttttgggatgtggtggcacaagcctgtagtccccgcaagttgggaggctaaggtggaaggactgcttgagcccaggagtttgaggctgcagtgagctatgatggtgccactgtaccccagcctggacaatagagcaagaccctgtctctaaaaaaatgtttttttttttaattactgaattcaggatatgaacaatgacagcattcttaaaagagagtcaacaagtctaccatagagctctatgacccaaccaaaagtcatagtaattccagtgctgaccacttgattatcaccagcagcctcagttatgggcttttaattcataaacagatgacttgatgaagaaaaaagggaactttactcttctgattcaggtatggctaagaaccaggccatgaaacacccaaggacctaagacacaatgcccttttaagacagctagcatgaaagtggttcttttccatgcctcgtacgccctaattgtggtagaataaagactgacatcccacaggatgtaagacgtgtgtttattaaggacatcgacttgtgccatctcactcaggtggggctggcaccattcttattttacagatgaggaaacaaccttggggaaataaagtaattgcctggagtaatggagctcagctgcattcttttttaaaaattaaataagaaatttttaagagatggtctctctgtctgtcattcaggctggagtgcagtggcgccatgataggtcacctgtcaccttgaactcctgggcataagcaatcctcccacctcagcctcccaagcagctgggattacaggtttacaccaccacacctgcctaagtttttgtattttttgtagagacagggtttcgccatgttgctgaggctggtctcaaactcctggcttcaagtgatccccttgcttcggcctcccaaagtgctgggattacagggatgagccactgcgcccagcctgttcttttcatcacatgactccactggtgatagtcttgcctcactatatttttccttttctccccatttaccatttatttgcataattctttaataacagctttattgagatataattcacataccatataattcacctatataaagtgtataattcagtggcttttagtatattcagagttgtacaaccatcaccacaatctattttagaacattttaatcacctcagaaagaaaccctgtaccttttaactctcactcccctgtcttcccattcttctacctccccagtgctaggcaaccactgatcgactgtctctgtcctattctgggctttcatgtaatagactcatataagatgtggacttttgtgactagcttcttttactcagcatattctcaaggtttattcctgttgtagcatatatcagtactctgttcaattttgtggccaaataatattccgtggtgtgggttaaccacacttgatgtttccattcatcggctgatggacattcacattgtttccactctttggttattaggaatagtgctgctatgaacgttcatgtacaagtttctgggccatgttttcttttctcttgggtatatactcaggagtggaattgctgggtgtcatatggtcactctatgtttaagcctttgaggaactgccagactcttttccaaagtggctgctccattctgcgttgccatcagcagtgtttgagggttctaattattccacattctagccaacacttggtatgacatgatgtctcattatggttttgatttgcatttccttgatggctaatgatattgagcatcttttaatgtgcttgttgacatttgcatatctcttggagaaatatgtattcagatcctatgcccatttttaattgaatagtttgtctttttattgagttgtaaaagttcgcatacattttcttctgtgggttttatacctttaaattattcatttatttattcttagagacagggccttgctgtctccaggctggagcgcagtggagccatcatggcttaatgcagcctcaaacttgtgggctcaatcttcctgcctcagcctcccaagtagccaggattacaggcgtgtaccaccacacctggctaattttttaaacgttttgtagagacagagttttgctatgttacttaggctggtctcaaactcctgagctcaaataatcctcctaccttggcctcccaaagtgctgggattacaggtgtgagccatggtgcctggccttttttacactttcttgatggtatcctttatagcacaaaagtttttaattttgatgaagttcattttgtctattttttccttggttgcctatgcttttggtatgatgtctattgccctactttttgcatgagaggtacatgggcctctttgtatctgaacatcagaaataaaagcaggatgggcaggatcaggactgcccttcagatgaggttacatgactcttctaaggtcacacagaagaggcagtactgggatccaccgtgggccagtgcaactcgaagcccttattcatcatagcacaccacagcatagcacagcatcatcagggagtggagaatgagaggttctgccttaggcccttcactaaagtgctcgctcttaacactgtgttgagaatccccttctcagaatggttacttggcaaatgttgaattatttctttcatttttgtttctatgtttttccagtgaaagaaatttaaaaaaaagaaaaaggaatgaacttaaaatcttgactggagggtaatgaacctgcctctcaagggcctgccttcctttgcattcagaaaactactcaaggttacaaaaaaccaatacatcccactggttccttgtaagaaattctccaaatatcaggaaatattgtgggaaaggaatgcatctctctctctctcttttttttttttttttttttttgagacggagtctcgctttgtcacccaggctgaagtacagtggcgcgatctcggctcactgcaagctccaccttccgagttcacgccatcctcccgcctcagcctcccgagtagctgggactacaggcacccaccatcatgcccggctaattttgtttttgtatttttagtagagacggagtttcaccgagttagccaggatggtctcgatctcctgacctcgtgatccgcctgcctcggactcccaaagtgctgggattacaggcatgagccacgatgcctggctggaatgcatctctttgacaatgcatgttgccacttaatactgccatttgttacttttaaaccgtgttatacatagagccaattcatgggaaaaagccctggttagcttcaaattttggtcacctgtcctgtcagcagatgcatatacattttataattgttttcaaactcccgattaaacaacattacagtaaaggagggctcagctcttaatcactgttccttgcctggtgtccagccacaaggtcattgcttagcaaatgttgatttaaatgagtagtagaatccaaaaaagaaaaaatctcctactattcttactctccagtccattaagtttgtaaattctttgtttccttttagttttcatctagatacagatgtgatttttatttatttttatttttttgagacagagtctcactcttgtccaggctggcgcgccatggccagatcctagctcactgcagcctcaaccttccaggctcaagcaatcctcccaccttggcctctcgagtagcaaggaccacaggtgcatgccacctaattttttaatttttgtagagacaggggtctcactgtgttgcccaggttagtcccaaactcctgggctcaagtaatcctcccatcttggcctcccaaagtgctgagattacaggcagatatgatttttaaatctgtacattaatttttctgaaaattctgtacatctaatactatgttgtcttcattattatcttactgtggtgacattacatcccataaattatgcacattgtttttattatatagtctttgggggaactttttttttctttctaagttttcacagtttagaggaggactacttgaagatttcatcatataaagttactactttggctgggtgcagtggcttacgcctgtaatcctagcattttgggagtccgaggcgggcggatcatgacgtcaagagttcaagaccaggccaggcgcagtggctcacgcctgtaatcccagcactttgggaggccgaggtgggcggatcacaaggtcaggagttcgagaccagcctggccaatatggtgaaaccctatctctactaaaaataccaaaattagccgggagtggtggcggacgcctgtagtcccagctactcggggggctgaggcaggagaatcacttgaaccagggaggtggaggttgtagtgagccgagatcgagatcgggccactgcactccagcctgggagacagagcgatactctgtctcaaaaaaaaaaaaaaaaaaaaagagttcaagaccagcctggccaacatgatgaaacctcgtctctactaaaagtacaaaaattagccagacatggtggcgggcgcctgtaatccgagctccttgggaggctgaggcaggagaatcgcttgaacctgggaggcagagattgcagtgagctgagatcgcaccactgcactctagcctgggcaacagtgcaagactctgtctcaagaaaaaaaaaattactactttgaggttatttcctcggggtctgtttgaaaaatgaaattgtgggggaaggacataacggagcttgggcattgtctcattgccagaccgcttccccccaaatttgagccaatttgcagcatggccagaatgtgtttgcccaagttgggtttagagctggtttacttggctgattttgctgttgtattcatcaccaataagatggatgatgattctgttttcttactataaattagttgcatatatcccttaactctcagtcatttcattccttgcagtgtatctttgttctgtacctgctcatatggagaagttcaaaaaatacattagtactttctgccccactttgtcactatctagttcactaattttcctaaaggaattgacttagctcatgttgcttcatcatttataaacatataaatgaggcagaggttgcattgagcgaagatcatgccactgcactccagcatgggcaacagagcgggaccctgtctcaaaaaataaatgaataggctgggtggcagaggtgggtgggttacttgagttggatccaggagtttgagaccagcctggacaacatagtgagaccctgtctctactaaaaatacaaaaattagctgggcatggttgtgcatgcctgtaatcccaactacctgggggactgagtcaggaggaagtcctggctgcagtgagccaagattgtgcctctacacgccagcctgggtgacaaagtgagacccctgtctgaataaaaaataaattaatatagctttggaattttttttcacttatttttctagtttcagttcagcatcatgtagtttgaatgatttgttgttttatagtattgtatttcatcttaatttagtaactctttgatgtgtttaagcacctaatccttttcataataagaacgatcaaatgtcctttataagttgccttgcaatttgaagtaaaactgtgtgagtgaatttctgtgtagagaacaatacttgtcatctggtaggcacatgagtcactctgagtcacttcaagaatgaatttagaattaatttagcttaaggtttctatagtctactggatacttaaaaaaaaatttaacttacgaggcatcttatctatttgaaactagcaacagccattctaagtgagggtttgtaaagtcaggcgtgagatatacatggggccatatgtaagttttaacataattctctgacaaaatgaaattctagggcgtgggagatactcaagagaaaaggtggatttgaaatgccccctgcttccccaagtttctgacaggtcacttctcagttgtgcatttggtacagaggaatgaaataggtatagaggctctttttggtttttctcaaaaaaagtgatacccactgggggagactccagccgagtgttctgaaagccagagtcctcagccgagagaactccacagtcttcaggccgttcccagctggaattctctgtgaaacagcagcaacagccagcagctttttggtgtctggggtagtttctgacccatcacagttcccttcattgctatgacaacagggagaataattattcaggttctgtttgattctagatccagaaaaaggtttaggctctttgttcaaagagcaaaagaattgtccgtttctttgtacatagaagagggaaaaaaaatccttatgattcaagagaaaaatgggtgcgtctgtcctttttcctttctttcacgtaaattataagtcttggttctagccaccacaccttttaagaaaaggtctgggactgatgtgagactctgtaccacagcgacaccctaccctggccgacagtggcaaaagaacaaaaggaaggaagtttcccttttaaatccccaggaattttttgatgagataatattacagagtgaaatgtctcgtcctcctattagtttagtatttggcttctgtgtaacagtaacccacttagaagcaggcggctcttttgaagttattttaaactctcagcctagtgtagagatttgtaaccttggataaaagcaccactagccctagtttcagttttgccctttcagacatgtggaaagtgcaccagtatatctcaaggattttgtactgaaagcttcttaaagagctggtcttggtttcaaagtttggcttgatgtaccatactcaagggaacatagttctttttctccagatatttaaccttgtctgacatcgtcttttggcttcgaagttcccctagcttctttgtccattaacaaaacatgaaaccacatgaaaccatgatagtcagtctcactgggctctgaggaagttgaagaaagttcatcttcatatttaaacataaaaccagttgtttgatacctggtaccagagatggccaggtatatgcattgcttgttggtagcattttgccttagtaactattcagaaatgcaagtggaatgttgagttcctcttctagaggttatatctgtatctgggagaaaattggagcttctcagaacaatcaccctggttattgtgtctgccgtctctgtaacacccaaatctatatcacactctgatgccacctgggagctatttttggttgcgaagggtggtgaaagctgctggttctttctcttaccgtgtgtccctgagtcatccccagcccacgtcctggatggctcccagaacagccgtctcagacgaagtctcccttcagatgtccactcctcagtgcagggggcctgtggggtctctcttggtcctgatgaaatccttctctgccttttccagtgagaaggacccatagaatctgctggaacacttggagaaagggacttatttccagcagtgcataaaatttttgattaaaataattcacgtgtctgtttataaaaagacaaagcgtacatcatggtttataataaaaaagagcattatcttgtttcaccttcaccacccctgattgctattcccagaggcaaccattttcaattctttagtggcttcttttgtcttcatctctgtgattctttctaaatttctgtaactcttatagtcaattgcagaataatttattgacctcctcctgtagaaaaagattttgcttttcactcccctcttctcattcctgcattcttccaatgtagttatatcacataggtcataccctgattatgggttccaatcctggtgtaagtttttgttttttttctggagttaatcattgctcccctcaccctggccctccattactttagtttgctgtaactatcacgtgtcatcctcttgttcagaactataaaactctcctcagtaccatctaacccactgggtaatgagtcatatttttgttgttatttgtttggctgtcctgtagcctcatccttctggccccatctggacctgtcattcaacaggctggttgcaaagccatcgtcctgggatttctctttatttctctaatctgtgggagtccctgtgcttggatcccatgcctgccttttccttagttttatttctttgttttgttgttgctgacagcaactcctgaggttggacgtggatgggaaaatttgagacttgcttttttggggaggacatcttctattctccttccccttctactgtcctttcaaggtgctgtcatggtgaagggcaccagtgttgtggtctctgtgtatagaaagcagtagccaccccagcgttcttgggctgctgtggccccacagcaaggccaaggaggagcagcctttgctcctataccattgccagtaaatcttttttgtcctggaaatgtctttgatgactcagtaatcaataactgtaagagctaggtctttcaaagttcatgcagcaagttaattaaatcctgacctatttgccctggtccctcacttagcagagcagagacccaagtggctcagcaaaaacagcaagagacatggcagcaggcctgcctccaggccagaggtcatttgttcagccagcagtcatttattgagcacctgttgggtgcaaagctctgtgtagggtgaaaggggacttctgaataagactgtctttctagaagcaggtgcccatcttagaggggaggctgtaggaaccagtaagcaccatacaaagcatttgagaatcaaaaagtattagttcattcaagaaagctccgtggaaggggtgatatttaagttggtcttgaagggcaaagcattcaaggcaaaggcataaaatgcaaatggacatgacaggtctagagaaggtgaaggagagagctttcccattgatggaacgtctactggtgttactatgttgatgtattttatctcatttaatccttaacgatgtctgtatttgtccatatcagttaagacagatgctacagtctccattttacagataagaaaatccatatggaaaacagataggggcatagagtgtggaagtacaggcattggagactcagaagggtgggtggagggggggaaggggaatggattatgggaaattacttaatgggtaccatttacattattcaggtgatagatacactaaaagcccagatttccccactaaacaatatagccatgtaacaaaatcacacttcaatatatacaaataattttaaaaatcaaggtttatagaaatcaactcatctgcctaggtgatgtgcctcataaaaggcagaagtgagatttcaacacaagattgcatgatctcaaatctcattccttccttcccaaaatatcccttggaacaaaataaggagtgagagggtaagagccacagtttcataataatgtcaaactcttgataaaggagtgagtaggcattttccttcagttgacttaagcaagatgtcaagtatcccaaagttattgcacaaagagcaaaagtaaaacaaaatcaaagttataacccaggacatattttctgttatatccttgcactttcattgtagcttattaattatttgcatgaagttcttctgtgaatctgccccagaagtttttcttgtcttctcatttcaagccatccttccccttagtattctctattggatggagtcttggttccagtctagggtttccatgtctatttgatttttttctttacgttttcattagtagttcttgagttcttacacacaattcagctgtttttaatcttcttaaaaataataaggcaaaaacataaatgtcaagcatctgactaggaaagccctacccatccaaatattttaagaaaataaactcagaaatgcctataacttttaaatgcttatatgctacattaagttcaaagttaacatgcttaacaccatacacggaagtatcctacgatgaattttcaatgattaggcgttcagaaccacacaggtcttatatgtagtcagtgcctatatgtcgctggctagtgttagcatgtgtgaataacacgcctggtttttacctgatgactgcagggatggtgtggaagtagtgtctagctgaaactttgggagagtttaggaatttcttacagagaaggttcttattctctacagatgattgttatccagataaggaccttgggatcttttaaaatcagaggctaataattcttttttatctttttaaaaaaattgagatgcagtcttgctatgttggccaggctggtctcgaactcctgggttcaaaccatcctcccacctcagcctcccagtagctaggattataggtgtgtgtcactatgcctggtttagggcctagtatttcttaggagaaagtagaaataaaggtttcattggggctatatcttaaaaaataaaaatgaaagtaatggtttatatttaaattataattgcagctttgtactgatttttgagaataaacaaagattgaatctcttgtgggccatgcggggatattctcagcaaaactgtataagactgtgcatatagcatccttcacttaggtttgagttcagccgggtgcgatggctcatgcctgtaatcccagcgttttgggagtccaaggcgggtggatcacctgaggtcaggaatttgagaccagcctggccaacatggtgaaaccctgactctactaaaaatacaaaaattagctgagcgtggtggcgggcgcctctaatcccagctactcaagaggctgaggcaagagaattgcttgaacccgggaagcagaggttgcagtgagccgagatcgcgccactgtgctccagcctgggcaatggagactccgtctaaaaaaaaaaagttgttttccaactgagaggactctcactttttccaaaggtctctcttaatcctttgatcattctctgtggaagctcccatgcgtgtttcttcttctttaatccttaactagattgtttgccattggctttgagtggaatccagttgttgactaataggactttcatggactctgttaaattctgcattggttgctgatttgcagttctagtttgcaacttatttacatagtttagtcactatatcatctgatattccaacaattagcaggagttcactgttggattaaataagagattaaaatgtgtaaaccggtcaggtgcagcagctcacacctgtaattccagcactttgggaggctgaggcggaaggattgcttgcgcctaggagttcaagaccagcctgggcgacattgtgagacctgtctctacaaaaaaaaaaaaaaaaaaaaaaagtcaataaatgaggtggcaagattgcttgagcctagggggtcgaggttgcagtaagctgtgatcacgccactgcactctcatctgggtgacagaacaagaccctgcctttaaaaaaaaaaaaaaaaagtgttaacattgcagatgtccagttaataggaaaggcctctgtttcacttttcccataaaatgcaaatgaaatggtatgttcatttgcattttatgcctttgcctagaatactccatccttgggacaggtcagttccctaagaatattttcacataatgactacttctgcttctctataaaaacatctcctgagctcgtaacttggagcccttgggaaaagagaacctcagggtggaaatggctggaggcctagggtggccgatgctgtcgtcaggggccagctgacagagacctgaatcgtataatatgatattcaataggtgggtcaaaggagcctgttagattgaattaacagacttgcactggagatgtaaactggaataaggagctcaggagagagggaacttagggtggaagtgggaaggtggaatggatggtgaggtaagttttctatcctctgagatgtgatctcagtggcttctttaccctccacaagagggtaaagcgtccctcccactggcactttagaaaaattccttttagttttaaaggctttcattcctgttcagaagtcaatgcccttgacggggctgatgtgttgagctgctaacagtcacccatcccagtgtcaggaagatttgatagaggagtttggaggagagtgggaaggaatgactgcttaggaggggagagagcctggcaatgaaatgtggcccagggcaccagcctgacagccccgagggacccctgggtgtgtttgaggctttcatagttcagatttctgcatgcccggacacgctctccacatgcctttcctgaggccgtgtgttctgctcctccaagagagtaagcctctggcctggtcaggcccacttccacctcactggctgcagtgggtcaggcctcggctttggcttcagctgcctcttggtttccattccttgtcttctccccgtcctccacatctgccgctctcccaagccttgtcttttctccagctgccctcgactgtccctccatttctttctaccatggccttaagtctttgcgtcatggatgttcagcatttgcagacatttagctttacctcatgtcatatttactgtaggtttattgccatgcgtgtgtatgtgttctccctaacttagcatctctcaacgtgtgtcccatgaaatagtgtgatcagattaaatgcaaaacaagtttataaacaaagggtaggaaatggtggttttagcaaaggttaaaagcctttttaaaccattggccactgcagagctttaattcacacatgtagatcctgagtccctgtgaagagtttctcagtgttatttacttgtgcaagaacctgtttttcatcttgtggtaggtagtattctgcaggacccagtttcctgaagggctgctggaattcacttaggctctggaagggtagaaaccacattgtccttcactgtgggatccccgtgttagctgagggcagtgctaggcagggcgtaagtcattcctgagtaagctcttaggacagttgcttgttttttttttttaaaaaaaaccttttaattgtgaaattcatataaaattcaccattttaatcattttaaagcatgaaattaagtggcatttaatatgttcacagtgttgtgcaatcttcaccaccatctagttccagaacgttttcatcacccagaaggaagccctgtacccattgaacagtcactccttatttgcccctccctgctgcccttggcaaccactagtcttctttctgtctcaatggttttgcctcttctggacatgtaatggaatcatacaatatgcggtgttttgtgcctggcttctttctttagtaaagttttgatatagatgcaaagtcttagacccagatgatacctatgctcctccaaagcaactctttatcattggccaaaccccataaatgtataagtaaccaaaagcagccattcatctggaaacctccaagttgtgtggccaggttaaaaataccttggaatactggttgccgttaccatgatttgacctgggacttcaggaagctggctgagctgtgctggagtgagccgggtcttgagccctttcctggaggtcagaggtgcctgagctgttgacataattggctcatccctcttgctcatcctttttctagttggaggtctcagcatttcagactactcattgtttaataactgtagaacattctagagtgggctgaatcctgcacgggcaccctggaggaaaggttgccccacccatggcaccgcagaacctccattggcccttcaggcaaattccatgagcctgaaagtttgtgcaaagttagatcccagggccctctatctcatatcttggaattcccaaggggtgggatatctctcacccactataaagacagctgctggccgccctgtgctcagcagtggtgacctctcacctgccttatgagcttgtgcaacccctttcctgttgtttcattgaattgtcaaggaactctcatttttggcctgcaccctttgccctccactcgttgctgtctctggagtccaagaataccactgctccaagaggttacctgcctgcctaaaataacttctttcagtgcacaatcttctgcctaaggacctgtaatgctgtcttggtgtccagactccatcctggtttttgagcccttctctttccttctcagtgtagacagtgacccttcctactcatcagactggatgcatccttttctcccctctatatcatctcttagcaactcctccccgggcttggaactgacctctctctctcgttttgccctgatcagtctaactcttccttctaagctcactcgaggctcagcagctgcgcaaagcctccccaaacattctagcaactcttgctgcctgcaccaaactcatgttacgcttgaataccacaggatttagagctggaaactttttttctaaggattttatctcttagtctttccctgtcagatggtcagctctcagaggaagggaagataaagtaagcaagtggtggagtgggaaggcactggattgtgaatccaagggcctggtcacctctgggtgtgccacatactggctgtgtcttggaaaagccacttatcttggatttctgttctcatctgtaaaacaagtaggggataatgtgggtgtattagtttcctatttgctgctgtaacaagtttctacaaacttagtggcttaaagcaacacaaattcattctcttacagttctggaggtcagaagtcccaaacaggtcttcagggctacattctttctggaagcttgaggggagaatccatttttcatctttgtcagcttctagaggccatcgtcatttcttgattaacggccccctcctccaccttcaaagcacatcagcctctgcttctgtcatcacatctgttctccatctttctcatgcttccctgcttcccttataaggacctttgtgattgcactggaccaacccagataattcagtaatctgtccatctcaaactcaatcacatctgcaaagtctcttgctgtgtaaggtaacttatgcacaggttctggagattaggacatagatatcttgggggccatattctgtctagagtgcattcttaggtctcttgtgtttctaacttgtcatgaatctaaagacgtatttcttccacttatttaagagcttagcacacacagtgctaggcttatcagcttcttgataagttatgtttatccctgaggatttcctcttctcagattgttattagggattctagggcctggtaccactcagtgatagaactgtgagcacaaaccttagggttgttctggtttgactgcactttcacacacagaaatttgacactgcttatctgcccatctttgattttgtgctttgcaaattttgaaaagacctcaaagaattttatctgtttcccagtaaccaggggtagcctttaaacagcctgttaattacactggtgatttctgtggtctctgcatagagtccgggatgtgtttccagatcctcttgcgtaagttgaagtagacatgttgttgaagtctagaagccaaacaatcttggatactaacatagctagtctcgtctgtaattgctacttagtgttaaatttatggtatttcacagcaatttagattggcatttatatgggaattgtgctgttttctttccctagatcctattgggcagtttccaccttggatcaccatcacttacaaggcagtaaaaaagcatgcataacatacatttataatggctctatagtgttctccccagtgctcagctcattgtgctgaaataaaattccccttgggttgaaaaactgtccccactcttaaaattttaagttttgacgttacttttggctatagcatctgagaaatacacaatatgagtcaagcaaatgtgtagcttgcctgctgaagttttctttccattttatttcctagatgcacccactgggcctatgtaataacaatgacgaagaggacttgtatgaatatggctgggtaggagtggtgaagctggaacagccagaattggacccgaaaccatgcctcactgtcctaggcaaggtaagcaccaggcccttggaatcactgtgtttctggttggtgttttccactcttccatttcagcattcctcaaatagttgattatggagaagagccatgctggcacagtgctccttcccggctgaagttgcatgaggtggggactgagacatgccttgcagtggcccaccagtgtttacaagcccagactgaaagagactgccagtctcagagcgggctctaccctcttgtccattgtgtggccttgggcaagttgcttcccctcaaggagtcttagtctcttgtctgtgaaatgggctaataatagagattcacaatactttatcttacacccttgggccagatgtttcagaattctgagatttggggggtttagaaaggcattaaggggtatagattttatattaagtaacctccaagagacatggggaggcactcagtaaccaaacacattcacatttgtatagcaaaccatagagatcttcacattaagtgggataactaaaatctaaatagcctcgtgttagttcacggcagctttgcctccagatgagttcaggtccattaagttttgctgccaagtaagttatgggaaaatgtttcggttttagagctttttttggtttcagaatggcagacagcaattatggtcctgtattagaacttacctcataggtggttaggaggtgagatgagatgcaaacgcctcacacaagagtaagccctcaataaacgtttgctgccattggctaccatcactccatttagaagtactaaaaaagactttttagccaagagggtcagcattactttgactgcagtataagatagaaataaatttactttggaaagccactcatcaacaatcttaaaatatgacaggtaacaacctgttttaaactggattttgtttagactgcatcattttgttaaaaggagaggttcagagaaggtgatttgaattttggctgggagaaaggtagtctgtcctaaggatagtggtactgactggatatcttttatattctcaaaagctgccattctaggtaccatggggagagagctggggcaaaaaactgtcctggttcctaacctcttgaggctctcttgagaaatccaggagagacaaggggtggttttgaagcagggtgctagagagggaagactttccagacttaaagtagcccctgccagtgtctcctgaaagacctttggctccaggtaccctcacaggtctaatctttttgtggtttttgcatccctcttgtcttctgaataacttcaagtcacttgtcaagttctcctgccctttagttggaaaaaataaccccacaggaattattagctgtttgctttacagttcacaaagttgaatcgaggtgttttaggtggctcaggccctgatacttcatcatttaaataattggccagagctgcttagtggtggtaggagagcaatgacccccttgagaatattttagtgttttcttaggagaaatgccagctacatctacagggtaggaacagtgctttccttgtaggtgttacgctcctaatacaacattttctcttgtactttatgcaggaattggctccttgacttcatttgctttgccccggtctggtggggctccatctttgtgtctctcgcatctataaatgggttggaacagggattacagggtcaccctatagttctcccatggtttagcggtggggaaacttgctgaagtcactcagagaacccaactatttcctcctctgcctggaacaaccatgtagtggttttacttggagagttttgtatgatttggcctgctagcctgtgatgccagggggaataaaaaaccctaggcatatattgaatcattaagtgcttcttaagtttattcactcaccaaatatttattggatgcaggggcccagaagctgagcatgtggttctacctgcttgcaagcagcagcccccacgtttctctggagaggctggtggcgggcagcatttgcacatggttagtcattgcagtttggctttgagtttacacctgaataaaatcattagcacagaagcttgggccaaagaaagacagttttgcatttgtttaaagcctgggccagtgtaggaggtgcgatgagtcaagatctctctctcttcctccctctctctcctgccgcccctctttctctcatcatcttcttaaagtgtggttgttctcagtctcaatttcattaactttgacaactgcgttttcttgttttatgagccccccgggggctggtagcaaaaaaataggttaaaggaaggcaaagttatccccttgggcagcttagtccctgcagaattcatgattttccatccatttcttggctctgaagaagcaggcagtggacagaggcagaaaaggcataggaggaaaacagccaagctagcttgggggtgggagctccttcctgtggatgttgaaacttgttgaaaacccacgaagggaggactctgtccgctgcaggcgggccaggcattcggaaaagcctgtgggagaagaggggtggcctagacacaggctaaccccctccccaccacccaccctcttcacctacccgcgtacttacagacaatgccacagggtgaaaccttgaaataagagaggatgtcctaaattaaaacacgtaaatgcctctccaagagttcaaataaaatttcattttaaaagcaaaaggcataaacttgtcacctcagtttattactgagtgcttttgaacttctcagaaaagaactctataaactcatgagagaaatatgatttatgatcccctccttctcttcttttccattctgtgggaggaggtacagtcaggatcagctagggaggcagcgttgggatgagggcaagaccccacaggggagcagcaggccagggcgccaggccaggcccagcctcagaccaggcatgggcgcatctctccagctttctgagcctctctcctgtacttaatgtggagaggctgttgtgggttccttgttcttctaatattttgagcttctgtatcatatttaaaatctttctttgatattctagttcggagagattctagttacagcattgaaaaacaggctctgttacctgtggcagtttaagtcctaagaagttaaaatagaataaaattgacatttcttagagtttgctattaagtaagggtcttggccaggcacggtggctcacacttgtaatcccagcactttgggaggccgtgccgggcagatcacttgaggccaggagtttgaaaccagcctggccaatatggcgaaatcccatctctactaaaaatacaaaattagctgggagtggtggcatgcacctgtagttccatctgcttgggagtctgaggcaggagaattgctggaggtggaggttggagtgtgctgtgatcgcaccactgtactctaggctgggcgacagaggaagaccctgtctccagtcaatcaatcagtcaatcagtcaatcaatgtaagggtcttaaaccatccccaaagcaaaggagtctatgtttatgtcccgggcatcttaaccctccaattcaatcagtgtttattaagcatcttatagagctaagaattttgaaggttgactttaatagctttacctgtggagagtctcatggcagggaacatgagaggtgctggcgtttctagcaaagcctggttggccctgattctgtaactcaaggcagaataaatgccccataaccaccaccccatgttagagaagattcttagggagaggtttggaaaacagcatgggccaggcgtggtggctcacgcctgtaatcctagtactgtgggaggctgaggcgcgccgattgcatgagctcagggatttgagaccagcctgggcaacatggcaaaacaccatctctacaaaaaacacaaaaattagccagtcatggtggtgcatgcctgtggtttcagctactcgggaggctgaggtgggaggattgcttgagcccaggaggtcaaggctgcagcgagctgagattgtgccactgccctccagcctggccaacagagagaccctctctcaaaaaaaaaaaaaaaaaaaaaaaaaaaaaaaagaagaacagtatggtcaataggcatggccttagctctctccaaggcttaatagtacaatgtggggaaattgagaaaaagataagaaagggagtttcatgtcacagagacccagccttggctgactgacctcagaaagggtacttcattcagttctcggtgcattctcctctgtgcagcagggctaatgctgcctgtgtcattgtagtgggggctctgtgagatatttgtagagcacttagctcagagcctggcttatgggaaatgttggatgaccatgtagaagtcagccatcacatgttgggtgctcgccgagtgctgagagctttacctatagcgtctcctttaattaatgctaatttgacatcctatccagattcccattttaccataagcaaatcgagtcctagagagttctctacataacctgaaattgaacagcttacaagagccaagatctgaaataagacccttctgcttcatcaatgttggtttcttctctttgcctccttttgtcttcgccagtttttctagataaaaatcagatgctcacctgggcacggtggctcacacctataatctcaacactttgagaggctgagtcaggagagctgcttgaggccagaagttcaagaccagtttgggcaacatagtgagacctcctgtccacaaaagaataaaaaaaaaaaaataataagctgggcatggtggcacgagcctgtagtactagctactcgggaggctgaggcaagaggatggcttgagccaaagagttcgagcctacagtgagccatgatcatgccactgctctctagcctgggatatagagtgagaccctatctctctccctcttccccccaaccccccgccccggccccgcacaccaccccccaccccccggaaaaacgaaaaagaaatcagatgccttttagtagtcaaaggcttggttaaaactgttagttccacataatagaaactcagcctgagctctgttgagcagaaagaggaatttgctctgaggattctgggctatgtcacagaacccatgacaggggtgctgatgcccttccacagcacctgactccagggcttggatgccagcggccccctcctcaactcttctccatccacgcatctgctttattctctcactccccatttggtaggagacgcagccccccagtctccctgggcatgaactctctgggttttgagtctgaaaaattccagaaaagggattcattggcccatcttggatcaggggctcacacttaggctagtcagctgtaccctgggggctgtcctgccataggtggggagcaaggggaagatgtgttctccagaagagagctggtggggggcagtgctgggctgtcatcctcatagcaggcccctgcagtcactaaatcatatatgtgatcatgagcttgtgggtgatgtcctcagtctatcctgagtcattcagagaaggttcagctggaagaaactcatggtctatgtgtactacatagaatcaaatcctcttcttcccctgaacacagagagtgattgtggtgagtgaaaagtgagtccacgtggactggaggagttgggcaggttttacagagtgggggttgtgtaagacagacgtacgaggagacaggatgaggtaggaaaagaatctccagaacagggcagaagaaaagggagcaagatgttcttcaaggagcattgaaagttgctgctgaaggaagaggctctcaagtgaaagagtttggtcttcattctctaaagagctgggagccactgaaggcttctgacaaaagagcaggtgttgtagaatctgtattctgggaatgttcacttggcagtggcatctattctggttggagagagatcaagttaccctgccactagatgttttgaggaacccagtggaaccaggcatctgttattttaaatgctttagtggggctcaagcccggaaattactgagggctcttcatgtttgccatctctcctttctgtttgcacatttaagcaaatgtgaaatgtaggagcaacatgtccaacagcatgggaaggtggaaaactatgttgaaagggaggagagctggtttttaatcctggctcttctgataagcagcggggaaaccaaggtacgagaggtgggtggaaaattgaaccatatggtcagcccactaacccacgtccagccctcagtgtcttgggaacttctttgcaaagcacaaatacagactctggtaaccaaaatgaccagaagacagagaaccgagtcaaaggaaccttgacttttcaaagtgattgggagagggggagcatgtaagggttaagacttgggtttagtcatcatactaacacaggtttcaaccccagttctaacccttttctgagacagggtcttgctctgttgcccaggctggagtgcagtggcacaatcatggctcacttcagcctcaaactcccgggctcaagtaatcctcccacttcagcctcccaagtagctgggactacaggtgtgtgccaccacacctagctagtttttaatttttttgtagagacagagtctcaatatattacccaggcaacaggctcctagactcaagcgatcctcctgcctcccaaagtgctgggattacaggcgtgagccaccgcactcagccccaagccttctaagctctgtgagctcctgcagtcacttaacgcgtctgtgtgtttagatgggaatagcccctaaaggagataatgtatatcaagtgttgatcacattcctggcacaaccaaaagcactaaaccaggtgttgactcttattgtccatcttctcttcctttctctctccctcctttattgtccttcagttcctttctttttttttttttttttttttttttttgagatggaatttcactcttgttgcccaggctggagtgcaatagtgtgatcttggctcactgcaacctccgcctcccgggttcaagtgattgtcctgcctcagcctcctgagtagctgggattacaggcatgcaccaccacgcctggataatttattttatattttttatttttagtagagacggggtttctccatggtggtcgggctggtctcaaactcaggtgatccacccacctcagcctcccaaagtgctgggattacaggcatgagccaccgctcccggctccttcgttccttttatcactcaaagtggtattacttaaggagtcaaatccgtagagacagaaagtagaatggtggttgctggggtggggtatggggcaaggggagttgtttaatgggtatgaagcttccatttgagaagatgaaaaagtactggagatgagtggtggtcatggttggatgacagcgtgaatatgcttaatgccactgaactgtgcacttaaaaatgattacagtggcaaatttcatgttatgtatattttaccacagttaaaaaaacaatggtattacttaaatcatttcataatatatggaagttgagagcagtgggtataaaaaaaataagcaattttttccttaagcgatggagcatagttgctccaggaaagaagtgggtgactgatgttactgaatcctggggcaaagcaaacccgcatcccatagaatgttattcccaaggagtgttctggacaatctaggtacaatgaggacagagaccaaacccttctttgtgcatcaggatgccctggggaaattttctacttacttttgaagaacaactcccaaaatagagaatttcggggaagggaagacagacttatttgttatcctctcttcatgacaaagtggatggaggataggaaaatcaaactaattgaaatccaaggctgggcggggtggctcacgcctgtaatcccagcactttgggaggctgaggcgggtggatcacgaggtcaggagagccagaccatcctggctaacacggtgaaaccccatctctactaaaaatacaaaaaaattagcctggtgtggtggcgggcgcctgtaatcccagctactcaggaggctgaggcaggagaatggcgtgagcccaggagcttgcagtgagccgagatcacgctactgcactccaaactgggcgacagagcgagaatccatctcaaaaaaaaaagaagaaatccaaagatgtttgaatttcttcactaaatattagccagaacctgatatgtaccacagtgatggagtgtggttggtacttaaaggaaaaagaactcaggaagaatccaggaagggggcagtcaccttatgatgatgaatgggttttgccaaacctctcagaatttgggcttttgttttctgaccattgtctcactgagttctctgatgaaagtcaaagctcgtaaaattacagtgtaggtgttaatctagcacagcagttctcaaagtgtggctgggggctggtagggattctcaaggtcttttctaggagcacccacaggatcaaaactgccttttttttttttttccaagacaggatctcactctgtcacccaggctagagtgcagtgacactatcttggctcactgcaacctctgtgccccaggctcaggtgatcctcccacctcagccacccgagtaactgtgactataggcacatgccatgatgcccagctaatttttctatttttaatagagatgtggttttgccatgttgcccaggctggtcttgaactccagggctcaagcaatccaccttccttggcctcccaaagtgctgggattacaggcgtgagccactgtgcctggccaaaactgttttcatgtaatattattttgaaattatttttattttttcgaggcagggtcttactatgttgcccaggctggtctcaaactcctggcttcaagccatcctccttccttagcctcccaaagtgctgggattataggcatcagccactgttcccagcctgttttcatggtaatattgaagtgacatttgcccttttcactcttattctctcacaaatgtatggtgaggttttccagggacatcattgtgtgtagtgacttcatcactctgacaactaatggaatgtgtgcttgcatattctgtgttttaaagatttctcagattataattcctaatttggtaaatatcaatagatataaccaaatcagaagttcttggggttcttaatcatttttgagaatgtgaaggaggtctgtaatctgagttcattgagctggcattatggccccactgtaaagatcatctcagagagcttagctgggttagagaaacccttctataaaatcagtggaaatgaacagaaactagaggacaatacagggagtaaaggtgaactattctgttctgcagtactggggccaaaagaatgttggttctgaagtgttagtaatttgagtaaaaccaatgggttgcagttttccacatttaataacaaacaaccagacagtgaatttgaagaacctcagcgaagaagatctgaatatctttgctgcttgcattgggatataaccttcaaccttgacgtagaacagggcttacctggatgggtctttacttgagacaggaacttgggtaaagctacagagttttttataagccatgtagatattgtggggatgaggggccttatccttccgcatgccatcctcattggggttttgatcacagatctgtatttcctgggatacctgagtgccctcggctttaacccaagttcagcttagcactcctgagtggtgagattctcaacttaagagggacggttgggccggaatccttgggtctgatttgctgtgggaaggggaggaggctaactgtcccatggacctggtcacagctgttccacatcataggtcttggcctcaccaggccttctctggtcagtgaaacaagtaggtatttgtcatgtacctgagcacggggcatactgactattgcttattgccatggcatccctggaagcacgctgcaactatttgggactgacggtatcgtaccttccctggtcctcttatcacattgtttccaaacgggggcaattttcaccccaggggatacttggcaatgtctggaaacatttttggtcttcaaaaatgtcagggttggggggtgggagtgggggtgcttactggtatctagtggagttccccttcctccttcattcctttctctgccccattgcctgccatgaacaacaggttcctggtagcctttgtgctatggttctgttgggaattggtgctctggcacattcctctctccatctgaggagtgtgaagagcctagatcttaaagctgaacagctgaggtgcaagtgatcgttctgttcagtaacagctgggttactttgggctgtttaacctctctgcctccgtttctccataccgcctctgtaaagtgaattctgataattaaaaaaagaataaagtggctgggtacagtggctcacacctataatcccagcactttgggaggcgagaggataacttgaagtcaggagttccagaccagcctgggcaacaagcgagaactcatttcaacaaaaaaacaaaaaaatagctgggcatggtggcacacactgtagtctcagctactcagaaggttaacatgggaggatcatttgagcccaggagttcaaggctgtagtgagctataatcacacaactgagagtgagaccctggctctttaaaaaaaaaaaaaaaaaaaaaaaagtatgacccaggcacggtggctcacgcctgtaatcctagcactttgggaggctgaggcgagcggatcacctgaggtcaggagtccgagacagcctggccaacatggtgaaatctcgtctctagtaaaaatacataaattagccgggcatggtggcgggcacctgtaatcccagctactcgggaggctgaggcaggagaatcgctggaatcagagaggcaaaggttgcagtgagccaagatcgcaccactgcattccagcctgggcgacagagcgagactccgtcaaaaaaaaaaaagtatgtaaagttcttggaatatgtgaatactcaacaaatatcactatcaatttctaaacatactgctaccaagcagatggaagtcccttttctaaggtgagcaagatgggtttcttgttgaggaggaagtttggaaagctcttcatatttattttaaggagcacttgggtagctatctcctacatttgattaaaaccggatgcaagcaagaaacttagtaaaggaaatcagatcagaaagaaaagattggcatgatgtaagtggaaaaactcagggaatacaagttttcttctaaggtcatatgtatgatttgaaagtcacaaaattttaatttgatgcttttcatctacaccacctaaatcttccatgaacctcttggttaaaaggctatattaagcacaatacttttaaaaaactagatcagagacatttttagctataaaaggctaactgaaaccattatttgagatccactgggaggcttaagagagttttgaagatagagtgagttaacagaacaaataatgtgtctgtcaagccaaggagcacaggcggctggccacctcccaggactgggggaagcctagctctagacactcctccctgccactgtccccatccattgaaccaggctcttgatgcaacaagggtcacaaatgaggctaaatcagagaactagagatggtatgactggccagctgaaaagcccatcaaaaatagctactgaagccgggtgcggtggctcatgcctgtaatcccaacactttgagaggcagaggtgggcggatcacttgaggtcaggagtttgaaaccagcctggccaacatggtgaaacctcatctctaataaaaatacaaaaaaaaaaaaaaaaaaaaattagccaggcatggtggtgggtgcctgtaatcccagctactcagaaggctgaggcaggagaattgcttgaacctgggaggtgggggttgcagtgagccaagatggtgccactgcacttcagcctgggcgacagaacaagactctgtctccaaaaaaaaagctattgaaaaaaaattagctgggcatggttagctacttgggaggctgaggtgggaggatcacttgaggctgcaatgagctatgattgtgccactgtactctagtctgggtgatagagcgagacccctgactctcaaagaaagctactgaacttgtctacctttgagaggccattttgaaggatagaggaagtaccagtatcgggtcagttggccagaatctctcattcctggagacaagcccaaaagtcccatctgctttttgttctcaaatagagaggcctcatatacatctggccatgcacatacgttatgccagccacaacagtgggcagtcactcgagtgcgttgcaggttgctggggctaccatgacagtgactgcacatgattggttttctgtctacgaagctcccagaaaacctggacatttctggagttccccctccctttcagtgtacttgtatagcacctgtgcaggagagcaccacacccctaacctcggtgacataaattctcactgaatgtagagacagaaggaaaggggacggcagagaaagcttgtctgtgagccttggtcacaagacctcagactgcagagacatgcaattacttttcttctgtcctttgtgtttccaaaagcaccatattttatttgataaaaggtacaggggaccattctgcttttgtgatgttgttttccaaatcaagcatcaggctctctggtctgagtaatgctttttgtgctgagtattaagtttgagacagtctaaacaattcctttgggggtactgaaatactttaaattttgcatcatttttgctagttataaaaataataaaagagtttcaacacattccatttgttctaagcactgttggattaaataaaattctggtcagcctgaagaacgtgggctatttcttgtgctatatataaaggtatgtggtctttactatttcacattaacctgttgctagaggttttcacaaatgtatcaattcacaaaagaacctcagagaaaagaatgtgaaatatgctaggaatttttgttaaccttggcttgatttttagaagttaaattttaaaatgttttagctttagaaggttcttttttcatttcttagtaaacatagtcattttcttggtgttttctaattttttaagttttaattgatgaaatcttaacatcttttagaacctaactgtaaaggtgtagttacaatttacaatttatagcatcaacttaatcttactatttcagttactgtattattccatttgcattactctaaggaatacctgagactgggaaatttataaagaaagaggttgaattgacttatggttctgcaaggtgtacaggaagtgtgttgccagcatctggttctagtgagggcctcaggaagcttacaatcaccacagaaggcaaagggggagctggtgtatcacacggcgagagtgggaatgagatgggggtgggatgcttctaggctggggtgcagtgatgcaaccatggcttactgcagcttcaacctcccgggatcaggcgatcctcccacctcagcctcctgagtagctgggactataggcacgcccaccacacccagctcatttttagattattttttgtagagagaaggtcttgttctgttgcccaggttggtcaccaactcctggcctcatgatcctcctgccttggcctcccaaagctttgcctttttttttttttttttttttttttttgagatggagtctcagtctgttgcccaggctggagtgcagtggcgcgatttcagctcactgcaagctccgcctcctgggttcacaccattctcctgcctcagcctcccgagtagctgggactacagatgcctgccaccacacccggctaatttttttgtatttttagtagagacagggtttcaccatgttaaccaggatggagctttacctatttttttaattggcgaatttttccttttattattgagtttattgagttatgagagttctttactctagacataagtcccttattagatacattatttgtaagtattttctcccattctgtgggatatcttttcactttcttgatgataacctttgcaacccaagattttttaaactttttttttttttttttgagatggagtctcgctctgttgcccaggctggagtgcagtggcatgatcttggctcactgcaacctccacctcctgtgttcaagcgattctcctgcctcagccttccgagtagctgggattataggcacacgccatcacgcccagctaatttttttatttttcagtagaggcggggtttcgccttgttggccaggctggtctcgaactcctgacctcaagtgatctgcccaccttggcctcccaaagtgctgggattacagtgagccaccgcgcccagccaaaagtttttaatcttgatgaagtctggtttatctatttttttctttggttgcttgtgctttttgtgtcatatctaagaaaccattggaaggcacattctgtcactgagatttgccagttgtccttactgtagtattttacatgggtcatatatttaaggtccttctgagattcctaaaaataattaattcccttttctcttcaaaagcttttaagttaatagagggtctagaagtgttcctctctcttcatcacttgtccttatcctgacctgccttaaagcatgatcccttgattttatctgggacatctgagccacaaaagtctctatatatatccattggcaagaggatggtagatccttatgtatgtcgatggtcaggattccttcaatttcagctcaatagcagagtggctggttaaaaatgtggaaagatgggagagccactgccaaatctcctcccatttttagctaatgatggttctggaagggactggcctgctatttcttacaattccagaaagtatccatgaatgtacatgctgctgctgaccagccttagggagggcctgatttcttatgggcttaaagttatagtccatcaaatctaagttagggcagataaaagacagcttatcaaaataaaggtacaagaggtgccattttgaaacctaatgctgtagaaaggatgtaggcaagtaacagctgtcagtaagcttcccacccctgctgcgctttcggtgtgtttgaaaagagaacaactccaagttccattttagaatgttaaagatctaaaaaatgtttccaaattaatttttctctcaaaggtttgctgatgcgcaccagactgtaaataattgccctaactgatggccaggcccttattctcagaaggggatataggtgtctttgtgggatgggtatccttaagcaggatctgtgctcctaagaacagcagcaacaggcagtgcagggaccttctgttgaattctacctgtaaaccacagcctgtctggaaggtctgactccaggccactcagccttggcaagcatgtacttccgaaagcgcctggcagaaatgggagctgatagacaggcgcacatggcagggggagatccttgtgcagtggcttgacactaactagaccagagaccatttcccatgttctttttcataacaccagaagcaccaaggaaagagaagaaaaaaattttgcacttatttttgggtcttttctatcacatgaaattcatctgaaacagttcaaattttgtttgatgttttagcaccccatttttcctgttataagatattcagtctctctgcagatataatgcaattggcttttatatcatgattatgtttttaaaaataaaataaatggagttgactaccacacagaagttttacttgggatggaaattgactcttcactaaaggtcaaaatagaatccatttgttttggctgggcgcagtggctcatgtctgtaatcccagcactttgggaggccaaggtgggcggatcacgagggcaggagatagagaccatcctggttaacacgatgaaactccatctctacttaaaaaaatacaaaaaaattagccaggcgtggtggcgggcgcctgtagtcccagctactcaggaggcaggagaatggcttgaacccgggaggtggagcttgcagtgagccgagatcgcgccactgcactccagtctgggtgacagagcaagactccgactcaaaaaaaaaaaaaaagaatccatttgatgtgcacgcatctcttaagaagtgactgaaggctcgtgcctgtaatcccaacactttgggaagtcaaggcaggaggattgcttgagctcaagagttggagaccagcctcggcaacatagtgagaccctgtctctacaaaacattaaaaaattagccagatgtggtggtgcatgcctgtggtcccagctactcgggaggctggagcgggaggcttgagcctgggaggtggaggctacagtgggtggtgatcctgctactccaacctgggtgacagagcaagaccctgtctcaaaaaaaaagaagtgactgaattacataaagctggatctcttaccagccccctgcataccccaatccctctgtctttgcttaggttgggctttcttttatgaataatagaaaataagaaaattgcctgttttgggcaatccaggtgtgtttcagagatttggagttaaaaagtcaagtaaatattttggcaacccaacaaaggtaagaaaagaagcatgcacctaacgggcttctcgaattacaggcttgtccaaacactgccttcctcaagagacgctggtcagggacaaagcctgccctgctgtcaacagcaaggcccggctgagaagtgggcttgcttctcttgctggtcctggccctgagccagataggacgccatttgactttgattcagtctgacccaagagaaaatataccatcagcaagtggaggatctttcctccttaacagactttagtcatattgcttcttcttccttgctgaaaaaaagcccaggtagatttttctctcccgttaaattggaaccctgaagttaggaggcacagtatctcagatactgtcagataacaagagccaccttttcagtctctgtaacttcatctatctcgagggttgggaggcagacagctatgaaagaagacccaaaagcagcagaatctgggcatcccaagtgtacccgaagcacgccagtctaggtggcccctctgtcacctggtttaagaacagacatcttagaaggaaggagctctgaccagctagtggcatgtctcctttcaagctgtgctttgtgtctcttcaacagaaaggcagacatcagagaactgcctctcttcctcgccctcccccagtggcttcccctggatcaccttggcagggcctcatcctgaggagggtgggtggaggagggaggagggcgggtggcggctgcagtggcggctcctttgatcacctcccgcccggttccagtccctgctgccagcaggccagccaaaggcccgactctactgatctgatgaggtgctgaataggacccgaagggcagggacagagcaagaagaaagcttcgggaatgaaaaggaaaccccgtgaacctgctcggcttcattggccggattttcctaccagggagccgctcagttcctgccagccagggactgcctgcccctcactctggcccctcttgtctccgcttttcagacctttgtgtgtgttttgtgtttgaatcacggctgctctccctggttctcaggctgggaacccactgcgcctgtttccatggtcactgggaagctcttagcgccatgtgcttcaaagggaacctttcccctcccagcactcgctgctgcctgccccagccaggctcacaataagcggctcctccaagccaggcctctgaccctcacttgccaggaggaaaaccttgcctttgccaagcaaggctgtgcagcctcacagaaatattcctcagcagagcatgtggatgcacacacacttgtggcacatcagtcctcacgtgcctacttgtagatttttatgagatatagagcttatagattggtgagagagtgttaactttcctcacatccctctgtttaggaacctttctgaaattgaagaaaagagcaaagcctaagccccttgtaggaaaagagatgagcttgtttggggtaggaggaaaggaggaagaagacccatgtcttttgggtcagcagagaatggaattgaagaacttagctctgggcttcctctccctgcagctggggtggtgagggtggtacctgttcactcttccagggccaaggatgcctgagcagttgcccaccaggcttgaaatttggctttgcttatttgttgaataatgcaggggaatgaagcctctcacatctgactggagagagtcagtggtctagtgatcttggagggctgctacatgatgacactggaattaaaaggtgactgtcaggccaggcgaggtgggcggatcacctgaggtcgggagttcaagaccagcctgaccaacatggagaaaccccgtctctactaacaatacaaaattagctgggcgtggtggtgcatgcctataatctcagctatcgggaggctgaggcaggagaatcgcttgaaccctggaggcagaggttgcagtgagctgagattgcgccattgcactccagcctgggcaacaagagtgaaactctgtctcaaaaaaaaaaaaagactgtcctctgaagagcttatgttttagatgcaaagcctgctcccctagcttggagctcacaatattaatatctgccttgggcttattgcactatatagagcctgtatgggaaattggacatttctccagtattaccagtgatcaaggttcttatcatccgtttctttttttttttttttttttgagacagttttgttcttcttgtccaggctaccgtgcaatggcacaatctcggctcaccgcaacctccacctcccgggttaaagcgattctcctgcctcagcctcctgagtagctggacttacaggcgtgtaccgccacgcctggctacttttgtatttttagtagagatggggtttcaccatttggtcaggctggtctcgaactcctgacctcaggtgatctgcctgcctcgtcctccgaaagtgctgggattacaggtgtgagccaccgcacctggcccagttgggctcttttgactcctgatattgtctttccttatcgttcctggttccttatcagtctccaggctggctgctgttggagtgtgggtggccccctgcagaagacactctcagtagttgtgctccatggctttctgtgtagtgatgggaatttcagggccatttcagatgtgccctttgtattactagaataaagtgcacctatttggtattaactctaatttctacttgtaactcatgattctggaaaaggtttctaaaacttgcagacttgaagcttccatcattgtaccaaaatctgtcttctctggccacatgtagcattttaagggtaggttttgataaagtcttagcccaggagccgcagcatcccaaagatgcttttctgttagaacatgcatacacagacctaaaagttagtacatttggcatgcctgtgaaaagcaaactgaagaagaatgctggctaccataaaacaggtgtcatgattgcattcctactgtatgccaggtgttttcacacattatctgaaatccttacagtatccccggagagaattgttatcagatgatcattttgctgctaatgcagggaggaggggacagaacgacttgaataacgtgtgtggtcatgcagctggtctgggcagaggtgggtgggagcaaaggcccctggctctaatgaatggtcttcacaggggtacctaccagtggttttgggattactttgaacagattctagggggaaagtttggttaaatttaggtaactggtttctcatcatttgggtacttgggaacctaataagtggacaaaacgtcccactgaaattatcttgttcacgtcatgcacggtggctcatacctgtaatcccagcactttgggaagccaaggcaggggaatcgcttaaggccaggagttcaagaccagcctgggaaacatggcgagacccccatctctacaaatttttttttttttaaactagctgggcctggtggcacccacttatagtgcagctactcaggaggctgagacaagaggatcgtttgaggctgcagtgagctgagctgtgatcgcaccattgcactccagcctggggtgacaagacctcatctctagaaaacaaatctctcctatagcttttaatttgctcctgatcgttcccttttgtaatatttttatcatagctcccctttttcttttatcagtttgcccctttcatagaaattccatttcttccttttttttttttttttttttttgagacagagtttcactctgttgcccaggctggagtgcaatggtgcgatctcggctcaccacaacctccgcctcccaggttcaagcaattctcctgcctcagcctcccaagtagctaggattacaggcgtgcacaaccatgcctggctaattttgtatttttagtagagatggggtttctccatgttggtcaggctggtctcgaactcccaatctcaggtgatccacccacctcggcctcccaaagtgctgggattacaggcatgagccacggcgcccggctcagaaattctatttctttcctttttgcaaagttacctgaaattgtacctctctcatttgtatgctcaatgaggaaggaaataagagagggtggcacaattaatctgtgttcaaaaatgtcatcatcactgtgtctcgtttgataagcagattgtattcttactagtgagagtagaagatcctgaatagttcagagtctggccagggcaccacaaccacacatttcagagcactgggccatggctgtggattcccccgaggaacgagtttgctgatgaccctgtttgtgctctccctgagggtgatggtttcacttattccatgctctgagccaactctcctaagattcttttatctaacatggcctgcagaagttaatggtggcatgatttactttgactattttagatgccaggcgtgtgtcttgaagagaccagtgaagaggggcttgaagttctgattcactcgaacttttttgggttttatgtctttcctttctcgtcagcatcaaggccatctaacttcaaggctgaatgaatgagttctgttttccttaatagggagagggaggagatggcctaggactcattcacagctgtgtgtgtggaaagtgcattggtgatagatcttgacttatttagtgatttttcagaagattgttggtttttcactggtaagaccaacaactatccttgttaaccagctttaaccagaaggactaaggaagttggacatctcgtaccactcgcaattgattttctaatgcagttctcttgtttaaattctgtggctgtgataatctaggtagccaattactcttttttgttaactaagaagatttatactgctgttgtgctagggtttgtaatttaaggtgtggacatgtccaggatgttaaatttagcttgtgtctcaaaactagagctatccaaactcttttttgctctggttgccctggtcccttgatgttcagcaagcagctttgcagtgcccacagcactccggcctccctccttggtactgcagggccactgtgaagagggaatcaggacaggatccttcaggtcttggcttaggcatctttttttcctaaaagtctttctggaccaatagtctgtcagcagggacggcttcacagaagagatgaaactcaacttttaagactggctgggtttgggggagggaagagaccaagaaggaaattccagcagtggggctggcaggagcagaaataacatgtggcgtatcccagagccagtcaaaaagagcaacttgactgggcgtgatggttttagcaggcaggagaaggtccccttgataaggaaggcatttccagggagtgcatcaagaggcatgcagaataatctgtcataagagtagagtttaaaaaaataaattcaaaaaaagaggcatgcagaagagtagtgcgcggtggagggagggaacaggatgtgcttaggcctagaaatagattgccattctggtcatttccatgatattgctgtgtattactgttctgtggcaatttaagtaaaagagaggaataaaactttgtaatgtattagagaccttaaaacttaaaatccaagaagatttttatatacctgaattaaaaagtgggacttggtagaagttacccaggaaacataaaaaaatgaacagccttctcatttccccacttctgtggtcctaattctttgaccttgaatcttctctctctctttaaaatggtggtaactatatacatcatataagcttcaccattaagtgtacgagttcagtggcattaattaagcacattcactctgctgtgcacccatcatcactgaccatctccagaactttttcctctttttttttttttttttttgagacagtgtctcgctctgtttcccaggctggagtccagtggctcaatctcggctcactgcaagctccgcctcctgggttcatgccattctcctgcctcagcctcccgagtagctgggactacaggcatctgccaccacgcctggctaatttttttttgtatttttagtagagatggggtttcaccgtgtctgccaggatggtctcgatctcctgacctcgtgatccacccgcctcggccgcccaaagtgctgggattacagacatgagccaccgcacccagcccctcttcttaaactgaaactccatacctattaaacccaggctcctcacttctgcctccccacagcccctggcaaccaccattccactttctgtctctaggaatttgaccactccaggtcttttgtgagtggagtcgtgtatttgtccttttgtgactggcttctttcacgtggcataatgccttcaaggttcgctcttgttgtagcatgtatcagaattttattcctttttatgatggaattatatatatcccattgtatctacataccacgttttggttattcattcatctatctatggacacttaggttgtttccaccttttgattactgtaaataatgctaccatatatattctgtatattgatcccttacctgatatacatgaaatagtctttctcatcctgtggcttgccttttcatcctattgatagtatcctttgatacacaaaagttttttctcatttttgtttgtttgtttgagacagagtctcactctgcacccaggctggagtgcaatgctaccatctcaactcactgcaacctccgcctcccaggttcaagcagttcttgtgcttcaacctcccaagtagctgggattacaggtgtccaccaccatgcccaactaatttttctatttttagtagagatgggtttcatcctgttggccaggctgatctccaactgctgacctcaagtgatccacccgcctcagcctcccagagtgctgggattacaggcatgagccaccatgcctggccaaaagttttgactcttaatgaagcccactttatccattttttctttcgtcacctgtgctttcggtgtctcttctctttttttgtgcttgctctttaattcatcttcatctaccttttttttgttttaaacacatagaaggttacacaaacatatcttcctactcagccttggtttataatttactgttgccctaagaatttcagaaaggaaaagaattcttgcttccctggctaggctcttggggtcttgatgtgcaagaagaaatgctgttgtgaatacaaagaatgatgaggaagtatacaaaaggtgccctaggctggctgcgggggtccagcaggctggctacattattctgtggtcaacctcttacaaatggggtgctcctgtccgtctccgtggccagctgccaccagccctatggtgtgaatggcaaggaagtggggactggcggctggccgaactccaggatgcagccttggctggcagagaaccaaaggcagagggggaaaaacactcttgagtatgagagaaataatgctagctccgaaacctataattcgcaagtttaaaaaaatttaaaaaataaaaaagatttttcaaccaaactgtgcttttatctttaggttctgaatgggagattgttcacacagctaagctggctgcagaagctaggccagttaaaacaatatgcaggcagctctcctctaagtaaccagaaactgttggctcaaaggagcctgaaccgaggaaccaacctgctgggagacgttttccaagtaactccaagcaacagcctgaatgtaaatcctcccgctggggaatggcactttggcaaatgaagaccctaattagagatggaagggtttctattttgtttttctttaatccttaccctggggcctttgcagggccaccatgtctctgcttgtgtgcaaagaaatttccagcttctctttgtaacaagatcctcttttgggaaagaagcaacaagccgacaatgtgggcccaccacagccgggggaccctgcaaccagcctaatccaaaacaaaaaggcctggtctgggccggagcagctgggtcacctggattggccaagtcgtttgaagttgctagccaagttggatcttatgttgcccctgccccgtgagacactcaaatccgtgcttagagtgcaagtgaagtttcttaacttccaaaggagaacagcagtgtgaacaaaatgcaaagcagtaagagagaactgtagctctgaggcactagggccaaggtccaattgaatgggtgtggagccctcttatctcctcagccttctatttgggtcttcactattggatctaaacagtgaagcagagggactatgctctctttcaaattgatcaccttagttctcaaaacatccagaagtatcacatacgtggagaacctgcccacgccagtgttgttttgttgtgggtgcaccattgacttacccagtattctcaaggtcttcgaactgatgattctgctcaatttcatttctctttggccctggaaaggcagttgagtagagctctctgggaccaaagtatcaagctggtcagtgaatgatacaatcaattttagatagttgtggataactgaagtgaaaacaaagacatacctttcagcatcctttacactggtaggtgtaggaagggcccccatcgagggccgttaacttacttgttaaattcgcagcttactacaggatgcttgtgtctaagtgatttcaacttctgaaggggaattacacattttttagtcttaacataggaaggatgcttctccctaaccacgactccatgctgagtctcaggctgggctctgtccagatagaatcatctttaatatttacaactctgtgatctggttggtaccctgctttaaagatgaatacattgagactcaggggaaggggctaagctacagacatcagccatggctccgtcccaggttagctccagacctcctgctcttctcatcagttctgtcctttgagttacttaagcgtatagatggtagttgatacagttctgcataacagactgataggttcctgaccaacagtctgctcctaccccctcttttttgggaagccgagtgctgttgaagagccacccattcctggttgccacatggtagacaaatatgtctgctgcatttacttcccagaagtcctcagcttgctcatgctgtctaaagttagctttcagggaatcccaagatgtttctttttcagctctctgcttgtggtcaggctgcttcaacttggagaaaaacggcccattctgttagctgtcgggcaaaatgatgactgtgaagagtatcccttccatgctagtaacttcccctgttccaacttctcagtttaattttcagtgaagcttctagaaaccacttaaagtcattgggaaacaggtacatcaaggactaaaaagaaaactggttttgtagatgcaacattgatccctctaaaaagataaggcaagacgacaccttgcccttttgtctttgattttattccttggctccttggaacatgtgctgattaaatggcaaaatatgatggcaatttttaccctttgttattattgaaaatctttgccaagttacagttacagctaatttaaagctgtatccaaccaaaatggtgttaagagagggtccctgataatttggatgtcaacttgcacttgtacctaatgaacagcttgactcattcctggctaaatttatgacagtggctttggaaggggactcagatatcaagaaccagattctatcacagatttttagattacttgtataggccataaaagcgtgatgatatggagtaaattgaataatactggatttttggcattgctgcttcattagcatgaggcactggatggggcaggcgtggaggcctggttaggctgggcgcaatgctctaacataagcaaccatgggcctcacagaatattggtggtagcctttcccaggatggtcttgcattgctaataatgctaaaaatgtctgtgttcagagaaaaacattatgaaagtcttaatagtctcaatattatcccctaaatagcttttccctggatttttttcatctgtcctggtcgtttctgtgtcattgctgtaaagtcacacagccaaagtcacacagccattccgagtattgcagtgacaacagcaaggatcccagccaaaatcttgtcctcaggaagagctgagacatgttactctaattatcactgatggttttattgctttggggtcatgtctcaccccttaccccctcacttagtggcatatttgatgttgttcagtcatctgaagtcactcatttatcccctgaatgtccccactggttcccccagtggcagcagtcccccggcctgcaggagttgtagtgcaggcttgggtgatgtgattcctgatgtaggtgagacccctgaaccaagagcagttcagcagctgcagctgctcagaagctaggcttacacaccatctccctgccgctccgtgtttgacagaaagcagagatgcttcagcctcctagctgcacttaaaggtagcctggatgcagtgagcttgactaagtatctcccttttgtagctcagtgtaaaatacagactctgtttttggaattcattcatatgtttattaagcactgcctgtatcccaggcagtgtgctagacgctgcagatacagtacttattaaagtagacaagttcactgcccccatggggctcctggtcagtagaggagacacagagacaactagcagcaagtaaacacaaagacaacaaacagggcaactgcagattgtgatgcagctgcaaggccaacaaactgggtgagtggggcttttctctgcataggctgcctcgagccaagagctcagagtcaaggttcctgaaagaagagagggaaagattcccacagcccactccccacatcagagcttgcctgcctccgctccgtcatctgttctttgacacatctgcaacctggggtgtgctctgatgcttcctgtcattctgtcactttctaacccatcaaacagcactttgctaccatataagtattagtatctgcctcctgtctgctaagaaataaaatgaaggcactcaagtcttacagaaagttagctcctttattttaggtatctcgttaaatattctctacttgattattatgtgacagttgcttttaaatcctctgaaagttgcataatatgctatgtgatacgaaaggatgtatatataaaacctttatttttctaataattgcctataacttaccagtttgaattgttttaacgcttattgtagcctaagaagtccaaagtttaattgaaatccagttttgttttttggctttgggttaatattcttccttccaggctgggcacggtggctcatgcctataatcccaacactttgggaggccaaggtgggcagatcacctgaggtcaggagttcaagaccagcctggccaacatggcgaaaccctgtctctactaaaaatacaaaaattacccaggcatggtggtgcacgcctgtagtcccagctactcaggaggctgaggtgggaggatcacttgaacctgggaggcagaggttccagtgagctgagactgcaccactgcactcccgcctgggtgacagagtgagattctgtttaaaaaaaaaaaaaaaaaaatccttccagacttctttccctctcccgtggttttaggaagggaaggacagctgggcatgatggcttaaccctgtaatcccagcagtttgggaggccgaggcgggtggatcacctgaggtctggagttcgagagcagcctgaccaacatggtgaaaccccgtctctactaaaatataaaattagctgggcgtggtggcacatgcctgtaatcccagctactcaggaggctgaggaaggagaatcgcttgaacccaggaggctgaggttgcggtgagccaagatcacgccattgcactccagcctgggcaacaagagtgaaactgtctcaaaaaaaaaaaaaaacaaaaaaactgaaactggcttggctgatgaaagttgtatcttatactgtgaactgaataatgttgcaagagattaagtgatcattactaaatgatgcccctggtactagtgaaggttgttgtcatagttcatgcagacctgcacagtgtatcgacctcatgttcacatgaagatctagatacctgatcaacgaagtgtccactcagcccctgtcaggtgcattctgggaggtgaagtggtatgtgactgccttgaaggaaggtgaaagcctagagacagattgtaatggtttagaactttctctttagaaaatagtgaataaggaaacaaggctttgctggggcagggggtgggagctctggcaaataagaggttcttctagaacccacttcctttgttctactaagtaaagtcttgctaacgctgaataattatagtcaagaaagcctgaatgaggccatccttttacttgttcaataaaggttaatttaaggacccaatgggacttgagatagagcttgaatttagggatttttgcaaattacctgttaaagccatgaaaacagaagtgtatttgttccttaatatgtgcatgacctcttactatttaagagtgattactgattaaccagggagtttcaaaggagatgttttcatattcagatttaaagaagttgctccagctcagagaactggcttctgttggagtgagctatgaacagagtagggctgctctatctcagagcattgttcattcacctggagaaacttccttcctgtgtcaagcacctgtagcatgctaggggttgtgcctgcccagtggtgcactaaagccacctctgcaatgttttcatccaagaaacatgaagtaggaaggaaaagtaacacttgcctagaaaggaaagttgtctgctccctatattctctatgaaattgagacagctattctttgcccccacaaatggcctttaggacagaaccattgagtgtcaaagacaggcccagcctctggagtatacttgtctatttccatttccaaaggtgagatgttttccaggcagagctctgtcagttttatgaaagccaaaaatgcattagccacacagggtacacttgtgcagtattttaagtgtaacttggttgccaacacttgaattggaaggtttaatataaaaatccacatttctaccttctcttgaaaaatcagaaggtctggcagtgctggtgtcccatttctcctggtaaaggaagccccagctgcctagaagttgcccccatcaggcaggtgtacactgtccagtctgccacggcgcctgccactctctgctgtcctcacactgcagcagcacatccattgccgtaaatcttaagtgtggcccctgtggacaattgagtttgcaatctgtgttgtgtgatttttaaattgcagggaggaagatcatccaggctgtctgtggaaagttgagcaaatcaagtgtgaacgcagaccaataatttctgacagtcaaaccataaatatgaagagggaccacagagaagctggattagcagacttgtatactctgattttgtcaagcactggaagaccaatttagggtgaccatatcatttgtcatccaagctgagacgcttttgagaatggaaggggttatggtgggaggagaaatgtaaactggggctgtcctgggcatgctaggacagaaactgtggacaccctaggcctgtgaatgggacatggaaacagaaagcttatatccgtcaaccaggatgagtgcagaaaagactcataagaggagctcacatagaggctacgctggtatagaaattgttctagaaaaattgggcaagattttgcagagaaaggaggcttttagatgtgtccttaagcattgaagcgctttgagaggtaatcaagggtccaggacagcagttgaggtaacatgaataacctatgcaacagctggaagatgtgcgtatgccttaacttttcagaaatgggggaactgtgtgggtggagcatctggtgcttggagggcagatagtgtgggaggggagggcggacgggcagaccggatccaaactggatccaaaggagagtcttgaacattataaggaattgagacttgaatctgagaaggatgagaagacagctcagggcatcatgtatggaatgaactggaaaaagattggagacagagaaactgctgcattacagggtagcagggatgcaaagggagagcccacttgaaaatgattctttatggagattggatgtggagagaggaaggggaaggggtagtgagagaagaggaggaagatttgggtttctagatttgtatgatggtgattcccttaacctgagacaagtaatgtaggtttgggagaaacttggtgactttgactttgatcaggactagagccctgactctgactttgaactggagccctttgaactctagccctgaaaagggtcagggctagagatgaaggttgagaagtcattagataggggagtgtgtattcaaaccaggagtccagaatgagcttgtccagaaaagagtatagactaggaagagagaaggggtacagcataggacttaaaggaaaacaagtaagtgagttgggaccatgtaagagtcagtgaagggaacccgaagacctcagagagaagaaaacagaaataggctgaggagcacaaagcaatgtaaacaggttggtagagtagcaatagtacagatgacaacacgggtgaggtagcatggccctgtgcattcatttagcacaggtgtatcagttagcttttgctgcataacaaactgcccttaaaacatagcaccctaaaaacaacagtcattttcattgctcatgattctgtgggttagctgagcagttgttctggtctgtgccagcttggctgatctctgtggtcagctagtggttcctctgggactgagtgatctaggatggcctcactcaagtgtttggggcctcacctgggatagccatgccctctcaacatgtggtctcttatcatccagtagactagcccaggcttcttacatgatagttctcagggttcccagccgcaagagagggcaagcatgaacacccatgaactattcgatcccctcaagcattttccaagcttctgctggcattgtatttgctcatgtcccattgaccaaagcaactcatgtggccaagcccaaattcaaggggtggaaaaataagctcaatttcttgatgggaggaatcataaaatattgtggccattttctttactctaagaggtgtgaatgtcttgtaacacttggcaggagatatttgattctttgtgtcaatcatgtatcttccttctagttgagctagtaaagattgaagattacaacagaacaacttaaattctgaagacccatttaattgtgattattttaattctgttcccatatgaaagctgaaggtagtacagggaaaaacagtaccacttgcattcatgacatgaagctaaagcgattactaaagaaattgataatacccagttcaaaactcaaacacaggtcccctctgtcaaagcagtactgtctgatttgcagcaattaacatcttagtgccatgttatttaagactagatcaatgattagcaatcattaattggcacctaccatgtacccaaactacaccaagcactttacacccatgaactatttaatcctctcaacaaccctataaagtacaatcactgtcttagttctacagatgaggaaactagggatcaaatattaagtgtcttgcccgaggatatcagtaagtgtgatagaaccagaaataggaaatagggatttccctcaggccactgggctcccctgactgtaggcagcattagcaagtatgcaccccaccccacccccatcttgattatccttatcttgatgaaatatagttgtcccctcacatttgtgggaaattggttgcaagacctcccccccaatccccccatggataccaaaagccacagatgctcaagtaccttatataaaatggcggtagtatttgcatataacctatgcacatcctcccgtatactttaaatcatctctgattactttatgatacctaatacaatgtaagtactatgtattaataaatagttgttataatgcatggttcagggaataaatgacaaggaaaaaaagtcatgttcagtacagacacaaccatccttttttttttttttttttttttttcccccaagacagagttttgctttgtcacccaggctggagtgcagtggcataatctcggctcactgcaacttctgcctcctgggttcaagcaattcttgtgcctcagcctcctgagtagctgggactacaggtgcatgccaccatgcccagctgattttttgtattttagtacagacgggctttcaccatgctgcccaggctggtcttaaactcctagactcaggcaatccatccgcctcggactcccaaagtggtaggattacaggtgtgagccaccgtgcctggccgcaaccatcctttttcttttccgagtatttttcatccgtggttggttgaatgcacggatgtgaaacccactgataaggagggccgactgtatactcacatctactgacctggggtctgcctgcctcccagagtccaggtgggctctgttctgctggtctaacttacccattcatccagatttcattgagaggggctttgtttttgtgtgtgtgtgggtgtgtgtgtgtgtgtgtgtgtgtgtgtgtgtgtgtttgagacagagtctcgctctgttgcccaggctggagtgcagtggggcgatcttggctcactgcaagctccacttcctgggtttacgccattctcctgcctcagcctcctgagtagctaggattacaggcacccaccaccacgcctggctgattttttgtatttttagtagagatggggtttcaccgtgttagccaggatggtctctatctcttgagcttgtgatccgcccacctcggccttccaaagtgctgggattacaggcgtgagccactgcactcggcctgttttaaaaatactgtaatcccggctactcagaaggctgagggaggagaatcacttgaacccaggaggcggaggttgcaatgagccaaggttgtgccatcgcactccagctggggaaacgagcgaaactctgtctcaaaaaaaataaataaataaataaataaaaataaaataaaatactgagccagttttagtagatagcagaaggaggtattatgttgctcgatctgcataatttttaaaactggctttggaattttcctatattaactaaaattaaatgcattcacatggtgaaaggttgtctgtgtcaaaatagttttgctttgaagtaataagaggcaataatggaaaaagaatagttgcagattctcccctcactccttgttttaatcttttttttttttttggagacagagtctcgttctgtcccccaggctggagtgcagtggcgagatctcggctcactgcaacctccgcctcccaggttctagagattcttctacctcagcctcccaagtagctgggattacaggcacgcgccaccatgcccggctaatttttgtatatttagtagaggcggggtttcaccatgttggctaggctggtctcgaactcctgacctcaaatgacccacccacctcgacctcccaaagtgctgggattacaggcgtaagccaccgtgcccggccttgttttaatctttattgaagtataatagacatgtgataaacagcacatatttaaagtgcacaatttgttaaggtttgacctatatgcacacacacatacacacacacacatgcacacacacacacccattaaaccatcaccacaatcaagatgaacatatatgtcactccccccacattccctcaattcccctttaaaatccctccctccctttcctggcttccctgccaaacaccagacaactactgatctgctttctcctactgtagacaagtttgcattttatagaatttaacacgaatggaatcatgcagtatatactgcttattctggcctctttgacgcagcataattattttgagatacattcatgtggattgtgtataacagtagttcatttctttttattactttttaagaaaagagaacgctgctttttttactctgaacttgggccaggatgattgaagttacctacgaattgtacattaaccaactaatggcagtgaagagttaatctgtaacttcatctgttagctgttaacgtgacccccaaacctaacctcctcttgactgtcagatcctgatcccagacacactttctctaaaggctaaaactgaagtaggactggagacttggggagcctggtatttctgagtcttggttggtccctgcccatcactggatcttggtgtagcatggtctcatgatagtgtgagaacagggttaggtatgtgactgtgtgaccagcagtactctgttaaaaaccttgactttaaattacttcatgaagtttcagatgggggaaaaagaacccacaaccctgacttttgtcagctgtccgtcttacaagtctgagttacgcagatgtcctaatccttttagaagcaatctcagtaggttggagaatttattgttgttacagatactcactttaaaatgtattaagtgaactcaattggtatatttgaaaatactttaatttacccttcttttcaagattccatctcccttataagctaccatacacttgcctgctagcaggtcctttatagtcaacttccctgtaacaaatgagagttttttgggtataaatgtatggggtacaagtataatttggttacatgggtatattgcatagtggaaaagtcagggcttttagtgtagccattacctgaattatgtatattgtacccattaagtaatttctcatcgtccacccccctcccacctccaacaaattggtttttaaaaaattctttccttaaatgcttggcttcaaatttcctggtacaggaattctgtaattctgataaaaaattgcttgaaataatacacaaaatgtctatgtgtttactaatagatcctgattaaagttattattgagaaactaacattggagtcctctaaattctgatttcccagaaaacaaaaaatcttcaatattataaaacttaatggactctacagaagtcggggcagggttgacaggaagcagttggctctgatggaacaccctcccccgctgccagcacactctgacctcaggaaagtcatgcctcctttgcaaatcttggacatgggactaggtgtgctttcatcccactccaggactgagggacacttgattcagatagaccatagtcaaggtccatgttgcctaagagaccctctttgtcccccagcatgaggactgcagtgactttcaagtggctcccaggagtggagaagcaggctgcttcccttgcatgggatccattaactcccaggcatggagaagcaggctcagttccctacggtgggctatattagctcccacaaatggagaagcaggctcagtctctccttgggtgtgctgcattgtctcccaggaatagagaagtaggatcagtcatttattccatgtggggctgtctggccagaactcttccctccaaagggagtggtttgtggtccctcttctggatttggctcatcagtctttccaaatgtcccagccacctggtaggtatgcagtttgatttgtttagcccccaaatgccagccagttccccatgcctgcctgatagctgggtgcctcttgagccaatgtcggcatattctacaattacctgcttatttgtgggggttacatagtgcttgtagttatagctctctccacttacccacaaaccagactgccaaactcctggatcataaaacaaagtgtaagcaccctggatcatgacccagctcttttcctgttcttcttttgagactttcctaacaggaaaggctctgggtaattgatagagattatccctgattcccttaatgtaacctttttactctttccttttcctgggattaagctgttcttttgcaagaagtccttttcttaatgacagtcattcacctgttattgaccaaaggaagcgatccggcccaactccacctttctgtggttcagtctctcgagtctctttcattataatgactttcaaaggcattaactgtttttttttttttgctttcaattttctgcactgttaaaggctgtcaaactatactttaatctgccttcctgaaacaataattgcccctgtatttgttggtgaatatgagtgttaatattgagtagatgttttaatatttgctgagggttcccaggcagcgtgcgttgctactgaggtctgctgttcacaagataacaagttgatataaagtggagacacataggctcagtcagcagtgcctttcttcttcttgcagtcctgtgatatttctcttcttcagggcacttacctctcactgtgcatgtagggtccctagtataactactagaacaccatgagaagaggcactagatcttttaggactaggttcttttggcatatgattgtaccttcatggtatatgctcaataagtatttgttaaattaatgaatattttgtctggaagcacattgccacaggactgggccttggtgtagggattagggaaccccttccagaaaaaataaaatttcaggtagtgacccaaaaatgtcagtaaaccatagtgactgcttggatgctgtgttccagaaactaaactgtgggcatgccagctgccaccaacagaaagggtaatcactaaatagttgttaagtttatacaatggccatgtgagtggataataatacccaaccatgcaaccctgtgctacttttttttttttttttttttttgaagacagaatctcgctctgtcgcccaggctggagtgcagtggtgccatcttcgctcactacaacctccacatcccaggttcaagcaattctcctgcctcagcctcctgaatagctgggattacaggtgcccaccaccacacctggctaatttttgtatttttagtagagacggggtttcaccatgttggccaggctgatctcgaactcctgacctcaagtgatccacccgcctcggcctcccaaagtgctgggattacagatgtgagccaccatacccagcctctatgccaccttttgctaacctctcccctatacttggtgtgtctgctgcctccaccagcacctttgatatccagctgctggctggccttctcttcctcttcattctggcagcttggcctccatgaagtctttcctgaccacaccagcctatggcacacatcacccccatccaggatgctccattgcagaagtgtattgagcatccttcaaaataatcccacccaattaaactcttaatccatttgtttcccttgttggtctagttccatttctctttctttcttttttttttttgagacggagtcttgctctgtcacccagcctggaatacaagcgcatgatctaggctcacggcagcctcctgagtacctgggattacaggtgcaggccaacatgcccggctaattttttgtatttttagtagagacggggtttcaccatattggccaggctggtctcaaactccggaccgcaggtgatctgcctgcctcagcctcccaaagtgctgggattataggcatgagccaccgcgtccagcctctagttccatttctttaacctagtggattgcaagcccctcactgctttccagcccgaaaggggcattgatgggattgtgaacacaggacagaaagtagtattaatgattattgttacaccccggatgcgtggtagggatgcttgggagcacctttattctccagctagcattagctgtcgggctgaggaaggctagcttgatgactctgccacttttctccttccccctccatcatcagcaccattgtgatgactatttattgagtaccaggactggaacgcatttgggagaaataaaagcatagatttgacacagccttcattctgttagcctatggaaaggtgattatagcacttgttacttgaattagacccgaaaatatagcacattttagggtctaattcaatataggacactctgcgtttaacttatgttttacagcctaactcatgactgctatggccaatatcccttctccacacccccagaccccatcactaaaattccttctagtggcagaaccgtcaccacttatcacagataagtggatattagttgggcagttgacatacaagttctgtgacttggttagctcagttcagagtatgtttgagggcttacttcaagaaagcatgtgtttcattttttaaaaataggtcttaaacctgaaaatggtgtccttgagattctcatcgttctctatttttatcctgttatcgcagaagacccatctggaacttgcattccattgctgtctcctactcaaggcagaggctcctatgcaagaccctgggactcctgtggcatggaggccaaaggcctggacccaaaagtcaggaggacttctgccacaaaccccaaaagcttgccccgtataaatggttgctcttgtgcccatggctgtgtccacccagcatttttgtgcctgctgggttccaggtgccatgccaagacctggtgaccagaggatgtctgtgatcattgttgtttggaggcttttgattgtgagggacccagacttctgctttgggggtatctttccccagacatcacaaaaagctcaattgtttattgcctcgaagacacattttctcttcaacaagcgctttccttaagtctgaggtagagtagcataagtgggtttcttgaaaaccagaaatgtagctgagaaagcagttgggccattctaggagggaaagaacaagggcttgatgagttaggttaagaagcacattcccagctcaccatctctccctctcttacctccttagcatcttggtctgtggttacgcatcttggctgcacctaagagttggcctgaggagctttcaaacctacaaaggctagatctacctccagcccggttcccattagtcaatctccaggaaggagtctacccctctattttttatttaattttatttatttatttatttatttttgagatgaagtctcactcttgtcccccaggctggagtgcaatggcgcgatcttggctcactgcaacctccgcctcccgggttcaagtgattctcctgcctcagcctcccgagtagttgggattacaggtgcctgccaccatgcccagctaatttttgtatttgtagtagagacggggtttcaccatgttggccaggctggtctcgaactcctgacctcaggttatctgcccgcctcggcctcttgaagtgctgggattacaggcgtgagccaccatgcctggccccctctattatttaataagctcccccaggcattccgacataccactgggctgacagccactgaccaccctctgccagactcatgctgtgtcatcatttcttggcctaaactgggacgtccctgcatgtatatgaagtgtaacatggtcatgtcaacttccagaagccttcaggagatagattcagtgtcatccccattgtgcagatgaaataaaacagaaaattcatcacatgctcacagtcacagagctgggaaggtgagctaggatttcagtccaagcagtgtgagatacccccttttcttcctgctcttccactatagcagtgctaaaaagagcctgggttggccagcctggctttggtagggtgtcatcaaactgactgcacccagataagaataacatggctgaggggggccatgtaactgcccttctctagagaaagggatttgattctgtagctgttataaatgattttggtttaaggtgaagagataatgaaattttcttaaactctactaatacaaaatcacgtaaaaggagtcaatatcatagggtacacaggggaccattttgaaacaacttagatccttaagaataaaggatgaaagttgtagtgtttgtgaacttgcattggctacaatggcaatgaatataacgcctttggatgaaatagtctttgactaaataggcctgagtttttaagcaggtaaccctgtacaaaagtaggaaaatgttccaccctgccacctctcagggagggccagatgtgatgcaatgagtgtgataggcagcaaggggagaaaaaaaatccctccttatgttgactacatgagctgcacgacatttgtaaagggaaatttcaagagaagggagaccaagtgggttaggataagagctatctggaatttccttgtgttaccaggaaatataatacttacataagctattaatggaatatttggaggttcagcattcacattgatatatgtgtacgtatctccattacacttgattttagaaccccctgggacaacatgagtatttctctggcctgggattatggagagaggcttaggtcaaatgtcagctctccactttgtggctgagtatccatgggcaagttacgtaacctttgagcctccagctgtaaaatggggatcaacaccacctcccttgcagagttgctctgcagattcagtatcatttgaaagcactcggtgccttgcctggaacattaataggtactttccttactttccctcttggagtctcagtaccactctatgaccaagcaggggggccgtgctttaaggcccctcttttaaaccttctggccacagggtgaggagtccaaggggaagcccctgtccaaaccattcccagcatccctaaactcccctaagatgaccttgtgttggtttctagcccttacagacctctcttctaggaccatcctcctggaggcacagtgcactggcagcatgcccctcttcccaaggatgtagacacagcttggcctcaaagcctagggtgttcacctgcctgtgtacaaccccctcaaagtgcagggtggaccaggggtcagctgtctccacactgacatgctctggcaaggagctccaaggagttggaaagctcacctggaacctatgtttcaagttcttatgaaggtacatatgtcaagatagaagagtaagatctattttatttactagtttgttagcccttgtcccctgtcccacgaatgttagaagcaagcaaaaatgctttcatccaaattaccttcctcttcataaaaataagaaaatcatgtaatcaaaataatcttctgccttctcaatgagtttaccacctgattcagcaattttctaacaccttcatttgcctcattgtaagtagtcccagtgcatgctggttagatggcctctgggtctacatcagtccaactgaatcaggagaggagctccagaaggtgcactggacagtcatgccagaggccgtgtgcaattttaggttagatcagtggttctctgccctatctgaattttaaaataactgcgaaacttctaaaaaatatattgctgctggggttttatctatatagatcaaatcatctctaggggtaggtcctgggctcgagtttttttgtttttgtttttgtgttttttaatctccccagttgcctcctccgtgagcgaaggttgagaagcatagctgcccctgtgaggaactcagccttcagagagagcctgcccgccgcctctcatcctccagagaggctgtagggtgtccagactttgcaggcactgttgttcctcgttaagcctgatgctgccacctaattaacacttgtttatattaattagttgccatatgcattgaaggggagtggtcctttttgaagtttctagttgctgactatataagatttggcctgaagtgggacttctggaaactcaaccaagataacgacttccaggttcttccaaaagcttatcttccaggcataggcaggtaatgaaacaacccaactgcggttttttccataacatctttcaccccacagtatcgatggagcaggagggtgtggacaggctttcctgggtttttggtgctccttgtcaggtgttaaaacaaagaggatcattgtgtttcttggaactggcctaaacgtctatgtttaagattaagatctagggaaatgcatttccgtttgacacccactagtttctgattgtgaaaagggtaccaacctgtgcaatggcgccgcgacccggccgcggactccagcctctaaagtcgggtacctttaattaggagaaattaagtggggctgctacatattttgagaataagtaacactatttaaacttaggcagccttaaccactaacttaaccgctgaattctcgctgctacatgtctcctaaatagatcagcataatcttaactaggacttaaaatgcatcatcttcgttccggaactcagaacctgcagccgacgggagcctttggaggcttaatgactttaattatggcgagaaatatcttctcccggtggggaggggcgcggccggtggcgaggagggcactttcccgggtcggagaaggccggatggcagcccgccccgaaagtcccggcccgctggattgggggttcgggggtggggggaacatagagaagcagggctggtggaggggaggagggaccctgcagggcggtacacgacgggtgggagtggggaggaggagggctcctggcgcggggaggagccgcgggaggggggatgttggccgcagggcctcggagttctgagctgtgtttgtggcttcagcgctttgatctcctgccagggaaacctggaaggtcaggccgggctgcagccaagccctggagcgaggagccggcgggtggagctggcagcactgcgccacccaccctcacctcccaaccccccaagcagtgaagcccgcctggccgccctggcctctcgcccccgctcctgccgctgcccctgcccctgcccctctttacctcctgtgtgttggtctcctgtaggccgtagattaaggggctccaagtcttgaaagtaagctagccaaatgccctgcaagtttggcttagtaaaatcatgtatgttgtatatactttaaaagaaaccagatatttttttaaagctgtgtgcgtccctttcctccaccctcctcatccccaccctagtacaaattacccaagaaccacaggtgattccccctgctggttcgtgagtgttagggtctagtttgcctctcctcttctaccaccaccaccacccccgttcctggcaccaggattttctcaccggttacccgtgtgctcttggtgtgtgacctcatttcctatggaatgaaaagtttctgtcggaaaacagggcccttggtgaggcaggccttgggagcccccttgcccagcgagaatgtcctgtgtcatgcagtgactcatgcttcagagaacagcagctgaccagaatgttcaagagcctggtgcctgggtggtcactactaagtgaagaactcgaggaggaggaaaggaaaaagtgaggagtaaggatttaaaatccacttagtggcctccagagggagggggataacaggactcaaagagcctgggctctctggcctggggtaggacccgccaagagggacctgtgggcgtcaggcgtggccagtccctaggaccggctgggtgctctccatcgtgttaaccgcccttttcccctccctgaccacaggagcaggcctggtggcggcaacagaaacagggctggttcctgccgccctgcatttcagcagtgacgtgttccaggctccggctttagatggctgtgtctctcaagccttcaagcctatgcttaagtctcttgttaccccaaattagggcaccattgagttggggattttgaagctgtggtagaatttgccaccagttcacccagagagccaaggcgccagagcttcgcaccaggtggggaaagcagccaaacctgcactttcctggggttgggccgctgtatggtgtggccatatttctccgcaggttgcaggatgaactccatcagtcttttaggctggaggaaaggcaaggccccctagtgataatgggaggaggctgtaaaaattcacatacagcctgttcttgtggacatggccaagggtagtcatctggccagctttcttttggtaaaggtactaagggaggctcccattcctgcagaatggatggaacaaacactgcaagtggttgggcttgttttcagagagctttgatatccagagatgagcacacgcaggggctggggcctgatacagatccacaacaaggccaagccacttttagtgcctggggtcaaggttggccggaggagacacgatgtctgcattcgaactgacaaccagtaaaaaggctgtcaggaaatgcaacagcagaagatggcaccagtaataagaaaccgaatcctgagaatcttaaagtgcgaagaatattatgttccaagaaaatttggtagagaacagacctttctaaaaagtcaaagggaggagataggtggcctagagtgagctgcaatcagtgctttcagtagcagggcccatggtgtttgatgctaacccctagggcaaaagctgatcttttaggttaatcaacaaacattttttggccatttaccctgtgccaggccttttgccgggttctgggaattcagcaggaaagaagtctgacacactggctgccctttagtgaaggaggcattttaagtaaacaatgacagtgtgatgtcataagtgccacagtggtggagcacagcataaggccactgggcaccgcagcctgagggaataatacctgaacagagagagaagcagtaaatgaaccctgtggcagggggtgggtaatgtgctcctcattgttggtctcctgttaccccacatgtggccaccattgagtttgggattttgaagagaactaaaagaagctcagtctaggccgggtgtggtggctcaggcctgtaatcccagcactttgggaggccaaggagggtggatcacctgaggccaggagttcaagaccagcctggccaacatggcgaaaccctgtctctactaaaagtagaaaaaattagccgggcatgatggtgcacacctgtaatcccaactactcgggaggctaaggcaggataatcgcttgaacccaggaggtggaggctgcagtgagctaagattgtgccactgcactccagcatgggcgacagagtgagactccatctcaaaaaaaaaaaaaaaaaaaaaaggctcaatatagttcaacttaggagtttgagtgttgtgttcagaaacaataagcaggaggaggtcacatcttaccctaagagcagcacagtcattggagaagggtggtgcaggtcagatccatgattgagaacggtccctctgctactgcatggagaccgtgttggggagggggcaggggcgtgcaaggtgggctgggctgaggagcccccagaagagaatgttgttgggacttgtgagaaatctggtgtcctggccagggtggcagcagtggggatgaaaaaacgatggatggatttggaagtcagaatcagcaaaatttggtaagccattgggcataggtgaaaaggcaaagggctgcagttttgactttgccccatgggtggaggaatgggggagatggggtacctccttgaggagggagcccaggtttgggggaagtaaggattgtatgaagagcaggcccatggcaagaccccttgcacctacatccacccgagcaagaaatgacccagaaatgtccgggacagtgtgctgtgctctgcgaatagctgcagaagtaacttggggacccaaaataaagcagaatgctaatgtcaagtcctgagaaccaagccctgggactctggtgccattttggattctccatgagcatggtttctgcccccttcggtcacactacttatatgtaagtctgtcagagaagaggcccaagtgaacactcacttggataagaaggggagagacctcagtgtcttcatgctgctgcttgctaagcaaggtctcttcacccaggacagcagcaagtgtgttatgacagacaattccagaaggtcctggattgtgtcttccttgggatgcctggcacccagttggccctcttcagtagttgtcagatggaactgtatactcgaatgtttccatactgataaccatctcatttaaattatgggtgccatttagtaattggtttccagatcaaaatgtaggtcttctgtcatatccttcagccttccacctgtgagttaaagtgatggggagtgggttaaggggatgatactcctctcaccttgacataccatgagccatggagcagagtcctcaagcgtgctccatggaagggagagtgttaacaggagttgctgcaaacaggctttgtgttcaaaaaagtttgggatgctgggtaaaataggagcctctagcatgttagtgatgtatatgtcagggatagctctggaatgtgcagcatttctcaaaggacaccgaccaggaaaatcattcccttagtagatgcactttgggaaaggctactatagagatatgaggcaagtgaagccatgttcttaatttcttacccatttgcccttggaactaaatgtacatgctcttccttattgactctcctggactcttcagagagggatctgccagcaccatgggcaggatgtgtgcttggtgaggacaggggtctgtgaccacgcttgctgccggctgctgtatgagtccccagggtctagaacacatagtaaccagttaataactaccgtggaacaactaaattaatacatggttaatgcaaatagaatttgactgtgaaccatgcccagggcagtctgctttgttagaccttttttttttttttttttttttaatagacacacggagtcttgctatattggccaggctggtctcaaactcctggcctcaagtgatccgcccacctcagcctcccaaagtgctgggattacaggcatgagccaacgcgctcagccatgttaggctttatggggcataccaatgtggtcggtaaggtctacctcctggctcctgggagtttctgttaatctccaagggtatgcctggcacccaagcgaggcctttatgtataggacatctataccctttgactcagcagaaccactcatggctattaaggacagatgcctccagaatatgagtacaaggatatgaatacagcactgtttataacagagaaaatatagaaatctgctacgtgcctcttagggagatggtcattaaaggagctctgaataaccatacaatggaatgatatgtgtagctggtaagaagaatgaatatttttccacatcaatgcatataaatattgttgagtaaattgttgagttaagggggaagtagagtacagaacagtgtatgtccaatatgtccagtctatttattttaaaattttttttctttttgagacggagtctcgctctgtcgcccaggctggagtgcagtggcgtgatcttggctcactgcaagctccgcctcctgggttcaagcaattctcctgcctcagcctcctgagtagctgggactacaggggcacgctgccacgcccagctaaatttttttttttattttattagaggtgggatttcaccgtgttaccgaggctgctctcgaactcctgaactaaggcaatccaccctccttggcctcccaaagtgctcggattacaggtgtgagccactgcgcccggccttaaacgatttttaacagctggggtctatgttgcccaggctggcctcaagctcctgggctcgagcgatcctccctcctcagcctcccaagtagctgggattataggtactaatccagcatattttaaactacattttggtgggcgtgtgtctgtaacacatgcattttattcttgccaatatgtgggttaaaaaaacaatggaggctataaaccacaccattatgttaaaatgctgggatatagggggtaacagatgagttattttttgctttcaatttctgagttattttaaattgttcatatcatgcacatattacccttataaatagcaaaaactctaaagatgatcgtattttcagggaaaatgtattacagaagtggtaaacaacaagagaaaccctaagatattagagctcagagagaggtatcttatctgtcctttggctaaggagaagcaccattagttttatggaaaaggttacacaggaactggaccttgaaggattagtaatgttagtattaatatgatcaactcattatatttgactctaaagtgtctttctgcatgtgaagtatcatcatctagagagttactctcaaactcacttctttctcccttccacccagctcatcaacagaccgcctaacccagaaattaaatctgttgacaaatttgcctgtattgtctgtgccagtctatctatcttgtcatttatgcagccaagtaagaattgggtgggtatataagaggagcattaaaatttgatgtggattttattgagattcttcataatctttatattctttggcacagggcctacctatgtcctctggaaactagaaatgaaaaccagtatttattcaatgtagtattaattataattttaaaaactggaacaacccaaatatcagaaatacatgtatagtgtgtaggaaaaaaaaatcacagccatttaaaatatttacaaagaatttttaataacttagaagcttatgataaagaaaaaaagccagaaggcaaaattgtattcagtagaggcaaaaaattctgtttggggctcccatatgtctgcaacttcctgtaagaggttgaagacatgtcttcatattagcgctaacagtccagcttccttggttagcttatggtcaggaatgtgggacaaatgagatttttagtcatcttttgggttatttcctattaagactgtattctgtcaaagttttcccgcaataaagggtaggcactagggataccacatccaagagcttgacagaggaacaggtaaacaggtgaaagtggaatccgtgccccagagactccagggaatagagatggcggtaggtccaagccccaaaccaagtctgggtataactacacacactggggagaatgccagatccattcctgagtggaattcctggtaagtggtgggctctaggcttcacgttttcccacccacaaagtggtgatgggacaattctcatcataattggtacatttgcactggaacattctagactcaatcttactagtaaaagcacttccttatgaaagaaaaccacataacattcacagtcagggagcactttctttttaccagtagtaacccgagtatggtaccaggcaagcttgctttcacttataataaacatttattgaataaccataggagtggtaagtgccaaccacaatagggccctgtcttctagaggctggaattttgtactttgcaaatgtattttaagggcgcaagtgtttgctcttttgctacttgtctcaatggccacagacattatctagtctcgagtccagcagccctgggaaggtaaataaaaggaccgtggcaatctttcattcagcactctgcactgggtttctggtcacctgctggctggtgccaacctgccctggcctgagcaaggatggaagtagcaaaggtgatgaaggatgtgaagatacccttgtgggtggggatgaggggaagggcacatagagggcagcaagacaaggcctttggctgcttctgggaggccttgccaaaacttcccacctgtgttctgcagtcacacccttctgttaatcttgcactccaggctgtgcacagtttagggataacggccctctccagctacagcccagtttaccagtgactttcatccaaccatatccaccaggctgcatctttcccatcctttctttgaaagggccccagcttcagagttttggacgttaagtatgtgacttaaagatcctaaagataggatttctggtggccacaagactgtgaactcctaattagggtctaggtttgttttgaaataatattctggtctacacttgagtaattaaaatggtgaatgatctgtgagagtgattggttcaaggaatatgcctcatcaatttttaaactgaaaataagggcagggggcaaagaatgaccaagtaatgttctgttgcttttttttttttttttaagacagggtctcgccctgtcgcccaggctggagtgcagtggcacaatcatggctcactacagcttcaacctcctgggctcaagcagtctacctcagcctcccgaggagctgggactacaggtgaatgccaccatgcctgcctagtttttaacttttttgtggagacagtcttgctatattgcccaggctagtcttgaactcctggcttcaagcagtcctcctgcctcaacctccgaaagtgctgagattacaggcatgagccactgcacctggcctgtatttttttaatttcctttcagaacagtataataaaagtgtctttttctaaatatgggttattcatggcctattttaaatcctaagctggcttctgacaggcaagttccctttaggatcttagcttggctcccctcctgtccagtcctggtgtgtgcaggaaatacaaactgattttaatagtagtttacattaaatattattttaaaagtagatcacctgtgcgaatgaagtatttttctcaaacaaggtatgtccttagatcctgtgcctttgcctggttgtattggaagtcaagctgtaaatggaatttaagcaccatatatatatatatagagagagagagagagacagattcaaacccctgggctcaagtgatactcccgcctcagcctcccaagtagctgggattacaggcccgtgcaactacaaccagctgccttattactgacctgccctcttcactgtaaaaaccaggaaacatatcaccatgtcctagattttgtgaaaaacgtcttttgtgtctctcaaatggatcatgcttcatccggaacctctgagtccttgagacctccacgttccgggcggagcagggaagcctgaactttaagaaggccacgtggctaaatggcttccctgaggcatgtctctcctgggaaggcattccctaccccagatcctgcagcctttcatcctgaggccattagactctccaggtgcacctgcatcaaagcgcacaggtaccgcgctcctgatctggacttatctgaattgtaccttccccgagggtgctgtttgatgtgcttgattgtggaatgaaagccaaataaaggaatgagaggggctgtttatttcctcatttttagtgcttttcctcagggcccttctatgtctggagaaggaatttatgaaaaagcctaggataccacctaagcggaaaacaccagcatctacttacaattatattaactctggcatccatgagctgttggcctctggcagaggagtctgtgtccctaaagagctctatggatagccagtatggtggctcatgcctgtgatctcagcactttgggaggccggaatgggaggatcacttgagcccaggagctcaagaccaacctgggcaacatagtgagacctcgtctctaccaaaaaaaaaaaaaaaaaaaaaaaaattagcctggcatggtagcaggcacctgcagtcccagctactcaggaggctgaggcaggaggatcattcgaggccaggagtttgaggctgcagtgagctatgattgcaccactccagcccaggtgacagagtgaaagcccatctctgatagatagaaagatagatagctctatggtggaggaaagtgatgccactctcgcctcacactttttcagctgtgtcatcagcatcctctcttcctggaggagggtgacagggccagtgtagttctgagttgctctgatagcctgctgcttctcatttgagtgaccaaggctgggaatttagaagggactctagtcataataacataggcggcctccctgcaccccctccccctttttttttttgaggcagagtctcactctgtcgcccaggctggagtgccgtggtgcgatctcggctcattacaacctccgcctcccaggctcaagtgattctcctgcctcagcctcccgagtaactgggagtacaagcacatgccaccacatccagctgattttttgcatttttagtagagataggctttcaccatgttggccagactggtctggaactcctgacctcaggtgatctacccgcctaagcctctcagaatgctgggattacaggcataagccaccatgcccagccatcccccaccgccttttttttttttaacagatggggaaactgaggctgaggctgaaagcaattgagtgacttgtccactgttggcagcatgccagtggcagaggcaggaatagctcccaggattcattcctgactcctagcctagcaatctggtgatgaaacagggtgtggtggacaatcggcagagactttcaatgcattgaatctccattcaaaaagaaagggtcccctgcaagacaaagacagattgtccagagtgccagaacttcttaaactgccaaggaacttgcagtatactgaagattttactgaagttgtttttggtactgtttggtgctaaatacaaggaattggtttgttgtaaaagctatagggtgagactgccctctagtgggccagtggagctattggtctagctgtgttctgggcaactttgctttctcacgccacatcaatgtagagcgattattcctacggaaaggaatttcaattttattctttctcaagcactgtggcccatagtaactctgttgatctctaagcactagccatcatttgcgcgtcttatagaaggctgggtttgccttctatacatacacacattagaagtgtcttacttccctaacaagattcaggctcctaaaagccaggacatgcatgtatgtatgtatgtatatattttgtggagacagggtcttgctctgtcactcaggctagaatgaagtggtgcaatcacaacccaacctctacctcttgggctcaatcaaacctcctacctcagcctcccgagtagctgagactacagttacgtcctgccacacccagctaatttttctgttattttttagataatggggtcttgctatgttacctagactggtctcgaactccagccatgctatatcttaagtcttgtttttccacagcttctgccttgctgtccccttagctggacatggaattagaaggttctttgggatggaaaggaatccttcccccacctcccccaaaaagaatcccgtcacttctcatttgttcctaaaacattctaatctcatccctctgatcagtagttccccaagtagttgaatcatctgaatcccccagaaagcatacacaactcagtttcctgggcctgactccagccctgctcaatcagtctctgtggtttgagccaggaaacctgctttacaaacttcccaagtggcttttgatgtgtagccaggtctggcagccaactgcttcaaaaccccatttacaattatttttcacagctcccaccaccgacagtgtctccagaggtcttcagcttgtgtcacttattaaaattaaccattttgagactcattcagaaatactcaatatattcttctaactgggtgacatgggaaggaaaaaggaaccgcatgagatggaccaaaggcacttgctttggttgccaatggctctgaaacaggaaatactgaaaccaatacctctgtactgactgggcaggttgttgatgtgtaggttgttttcagtatttgggctggataggaagacaaaagtttgttaagttatcaattatgtattttcccctattataagtcatctgacctcatgattaccatacaaggtaggtgaaattgtcctctttaaaaaaaagttttctaattgacagataataattgtacatattcgtggggtacatagcaatatttcaatacatacaaggtatagtgatcagatcagggtaattcgcatatccattatctcaaacatttatcacttctttgtgttgggaatgtccttctcctagctatttgaaactatatgttattgttaactctagtcatcagtccccttctttatagatgggaaaattgaggattaggaaagtgaagtaacatccctgaagtcacctaagttggtaactgtcagattctgcatttgattacaggcctgattgccaaggccaactttgaaaaggtaagaggaccagagggccaacctgctgtttttttaactctggcaggccaagcgagcagtacagcggggagctactgcagtcatctttgatgtgtctgaaaacccagaagctattgatcaggtaagctcctcaggccatgccaacactgcagcctccctgagaaaggcacttcctttagtgagcttggcttgtcccggtcatgtcaccctcatctcagagcatttgctcttgtcttctgaagttaggtgtccatgtttggacataattcccaaaggaggtatactgggcgaggttaagagccagggaattggggcacagggggcattttctctttttttcccccgagatggagtcttgctctgtcacccaggctggagtgcagtggcgcaatttcagctcactgcaatctccacctcccgggttcaagcgattctcctgcctcagcctcccaagtatctggaattataggcacgagccaccacgcctggctaatttttgtgtttttagtagagatggggtttcaccatgttggccaggctggtcttgaactcttgaccttgtgatccatctgcctcggcctcccaaagtgctgggattataggcgtgagccactgcaccgggttcagggggcattttctaagacctttctgggccttctgcttgcccagtccatcccaaaacaagcgtcattctcagccttgctcttctgggagctccaaggctgtaatgttggaagagctggaggattccagacaggtattcagtgttccttccctccagcctttctttctctctactgcttcttaaagtaagcgcaccttttaaccagagccctctcttcttccttagctgaaccagggctctgaagacccgctcaagaggccggtggtgtatgtgaagggtgcagatgccattaagctgatgaacatcgtcaacaagcagaaagtggctcgagcaaggatccagcaccgccctcctcgagtgagcctccgcaccatttggcacaggctcggggccttctctgctactacctgtccctttatttcccttgggctttcattcctatctctgtctgaaatgctggcataccccaggttcctgcaggcttagatcagctattggactcaaggccagggtgaaattttactcatgttcctttatagtgaatttgagaaatcctaccagaaatagatacttttgtgctaagatgtctctggcctcttccacctggcattccctcttggccatctctcatcctttcttttccatcccatctccctctgaaaggcaaactgaggaggattgaagggatggggcatccagcacctggcttcccgtggcttccttcttctatctggcttagacactagaaaaaaaggcttgtatttccttcttcctgtagagtagattaccttattgaaactccccaagttaatttgagtctggaaaagttagctttcaactgggattgagttcgacggctaaatgaatagcatctgcatctcttaagtatgtagaagagacactactggccactaactcttaaccagcctcttctgctcaaacctcaagctgaagaattccaggaaccttgggctggtgccctatattggtgttatttcctcctcacaaatattgggacattcacagtgtaggatgattctttcccatacacaacatagccggttacatgcagcttccactttgcaaagctctattcccattggccaaatggaggtcccagataaggtggctgtgaggttttaggaggcagtgaggaaaaggtaagaactaaaactagagggagtttgctgaactgacttgttggcttctttttaaagggaaaaaaaaaagcgctttggtaaatatgactcattgtagtggaagctgatatttgtggaagcagcatacaattttctgagttgttgtaaaccattaattatacggttagtaatcactgttccctcaaaacatgacactcactcttttgtcctataaatgtgattatttgtgttgatttggaagggcctttcttaccagttacagccaactttgcagtattccacaggctttaccaacagagttcccttggctcttggggggcctggctgagatcgccacaggcgtccccctgggccacaccaaaggcactacatgggcctagggagcacaccatgtgcatgtgagcagaaccccaggagtttcctgcaaattgaggggaaactcatcccggtcaccccatctttatcctgacaaagccaagatagcccatgtgccgcttaccaggctggagagaggctgtgactcactgtgtctgtgttccgttccagcaacccactgaatactttgacatggggattttcctggctttcttcgtcgtggtctccttggtctgcctcatcctccttgtcaaaatcaagctgaagcagcgacgcagtcaggtagtgcctctgtgtgtagcccgtgagcagtaacccctcttgccgtgacactggggaaaaccaggactctcgtcaccttattttttgatggtgcaacatggagcctcacagctgtggactctgagctctgcagcctgttcccagtggcctagaaactgcaaagatggaaaaaaaataagagcaaactaggccaggcaccatgactcacgcttgtaatcccagcactttgggaggccgaggcaggcagatcacttgagctcacgagttcaagaccagcctagtcaacatggcaaaaccccgtctctaccaaaaatacaaaaattagctgggcatggtggcatgtacgtgtagtcccagctactcgggaggctgaggtgggaggatcacttgagcctagagggcagaggttgcaatgagctatgatcacaccactgcattccagcctgggtaacagagtaagaccctgtctcacaaaaaaaaaaaaaaaaaaaagatcaaaacttacagcccagtgccttctctgttctaaaagggctagtcctacaaaggttaagcattgggaatatctccagcaggtgtttcgaaggaagtgtttattttatttttttatttctttgagacaagatctcattctgtcacccaggctggagtgcaatggcatgatctcggctcactgcaacctccacctcccggggtcaactgagtctcatgccttagcctcccaagtagctggaattacaggcacccggctaatttttgtatttttaatagagacggggttttaccatgttggccagcctggtctcaaactcctaacctcatgtgatccgcccgcctcggcctcccaaaatgctgggattacaggcgtgagccaccacgcccgtcccaaaggaagtgtttaagtcaacgttaataagtattataaacactccacaggtctagaatatgtgctgtagcagtctgagttttgagtgctttctctgaagtctattctggcatgattgagaagtgtttgcctgtcccagtacatcaagtggcgccctagagccttggtcctcagatagaatctgtggtccagcagcaacggcagcacctggaagcctgatagaaatgcagggtctcaggctccgctccaggccacctacacagtataccaggctctctgggtgatgcttgattaacagtagctgctgtagcactgcagccacatcactttgtgcttgcaggaaggagaaactcgggtagggggtggtgagaggataagcagagatctggacccccaaatgtatggcagggtcatgtctcaggggagagatggtggatcttggaaggcaatctgtagagaagagaatcaccaaagttctcttgagggttgagcgaccacccccaacaagatgatggcttgtgttttttgagcacagcctatttgccaggtgctaagcacttacacattgtctatttactgtcaccacctccttcaacagaaagaggaggaacgcttggcgtagaacaggttgataactcggggtctggcagagttaggaggcagcaggtccaagtaattggaggagacccctgccttcaaatcagagagacccctgctagtcttgccacttaggaaaagcctaggttgatgtcgtggacaccccacgcgtctggagaatatgtgctatggcagtctgagttctgagcgacttctcagaagtctgttccggcatgatagagaattgtctgcctgtcccagtgaatcgtgtgtcatgtccctggggtgactgccactttcatacgtactggaccctcacacagactacattctgccctgcagaattccatgaacaggctggctgtgcaggctctagagaagatggaaaccagaaagttcaactccaagagcaaggggcgccgggaggggagctgtggggccctggacacactcagcagcagctccacgtccgactgtgccatctgtctggagaagtacattgatggagaggtaatggcagaagcaggcccgtcctgggtggggaaaacataggcaggtcagcagaggtgcccaagacctagaaggacagggccctgtgttccatcacacacatcaacttttagagtcactcttctgaaaattctgagacttgacttgatacttagctgggtgtttttacttacaaagagacaagggattttatatccctcacttttttttcttgtagctctttgaaaattttaggcctagtaccatgcctgtagtcctagctacttgggaggctgaggtggaaggatcacttgaggctaggaacttgaggctgcagtgagctattattacaccgctgcatatcagcctggacaacagagtgagactttgtctgtcttagaaaatttcagaccttcagaaaagactagtaccatagacgatatatgtcaggggcctagaatcatccatgatgaacattttgccacatttgctcactctccctctctctagacagatgcatacatacacatatttgcggggcagggagcaaaccacttgagaattacagacatttgatgcgcctttgttgaaaatgttccactgctgcagagactgttggatggaaatggaatttttgcagaatagaatagtagattcttacacagactctgggttctaatcctgacctgggtggattctagctttgtgatcttgggcaagtgacttcgttttcttgtgacatgggcctgacactgaccagcattccaggtgatcatgaaggttccatgagaagatccagggtagaccctttgtcattctgtcaggcacagtgttaggtgtgagctggaatattactgtactagacaggtcagaaaattgaaagacaaagtaaaatgagcaaatctggaagatgcttaggcttaggaactctggaggtggttctgtcccaataactctatctgtctagataggctgcttttcttataaaccacacaccccatggtgaggttcaggatccagtaaaggaggggatagcagagctttacccctttgctgccacacctgtcaatcatgagtcccaggtatcttcctttctactcatgcctatttgggatacccagggacagccagcacctcagagatgcagaatatcttggggtatacctggccctctctccatacccctaagcctcccatcctcactagcaggaggactcggccctccctgggtggaggcatgagtgtgtttgccctcctccagctacgggaaagacgcctgcctctgtgcgtgcccactcccttaacactgaggactgtggatggggctgactgctggcagtttccttcttcctagaacacatgggtgggccctgcttctagggaattgagccctaattggaggtggggaggagagtagggaagggcacgggcatgctgtgcagaactccttggtctatgctggactctgcaggaggacacacctgcgaggctgaaggcagacttgtgtcccctctctccctgcccaggagctgcgggtcatcccctgtactcaccggtttcacaggaagtgcgtggacccctggctgctgcagcaccacacctgcccccactgtcggcacaacatcataggtaactgtcacccgccttagccattgctgaagagtcaagtgcctagctagagtgtgacacacaccgcaggcttgggaacactcagaaccaccgtggcactgccctctggacttggaggcctggcagccctgggttttggaggttgtctgcacgacccttaggagagcttggcattaagaatcaccctgagttcaagtttgggcttcacattaagcagcttcttgacctcgggcaagacatctggcctctcctaggcctgaggcccctaatctctttagtggcaatgacagtaatggtgtttgcccacacccagtaccatgggggtgttcctaggaccacgagagacgatgagtgtgcagaggccagcttgggctgttgctcctgcatcactgtgtcattaaacagggatggagggacactggcatctttgaatccgattcttttctgcagacttctgtggtgccctgtcaggcagagcagtggggagttgggagcggggcccttacaggagatgggccatttcacacagacaggcaggtcagcctctgccgctgcagctcagtttgggggcagggttgtgagaatgggtaccttggcaggtgaccaagcctgctgcttcagcctttgcccgttttaaaaatccctttagcctctgacaccagtatgctcagccctgcctactctgtttcctccacttgtctccagaacaaaagggaaacccaagcgcggtgtgtgtggagaccagcaacctctcacgtggtcggcagcagagggtgaccctgccggtgcattaccccggccgcgtgcacaggaccaacgccatcccagcctaccctacgaggacaagcatggactcccacggcaaccccgtcaccttgctgaccatggaccggcacggggagcagagcctctattccccgcagacccccgcctacatccgcagctacccacccctccacctggaccacagcctggccgctcaccgctgcggcctggagcaccgggcctactccccagcccaccccttccgcaggcccaagttgagtggccgcagcttctccaaggcagcttgcttctcccagtatgagaccatgtaccagcactactacttccagggcctcagctacccggagcaggaggggcagtccccacctagcctcgcaccccggggcccggcccgtgcctttcctccgagcggcagtggcagcctgctcttccccaccgtggtgcacgtggccccgccctcccacctggagagcggcagcacgtccagcttcagctgctatcacggccaccgctcggtgtgcagtggctacctggccgactgcccaggcagcgacagcagcagcagcagcagctccggccagtgccactgttcctccagtgactctgtggtagactgcactgaggtcagcaaccagggcgtgtacgggagctgctccaccttccgcagctccctcagcagcgactatgaccccttcatctaccgcagccggagcccctgtcgtgccagtgaggcggggggctcgggcagctcgggccggggacctgccctgtgcttcgagggctccccgcctcccgaggagctcccggcggtgcacagtcatggtgctgggcggggcgagccttggccgggccctgcctctccctcgggggatcaggtgtccacctgcagcctggagatgaactacagcagcaactcctccctggagcacagggggcccaatagctctacctcagaagtggggctcgaggcttctcctggggccgcccctgacctcaggaggacctggaaggggggccacgagttgccgtcgtgtgcctgctgctgcgagccccagccctccccagccgggcctagcgccggagcagctggcagcagcaccttgttcctggggccccacctctacgagggctctggcccggcgggtggggagccccagtcaggaagctcccagggcttgtacggccttcaccccgaccatttgcccaggacagatggggtgaaatacgagggtctgccctgctgcttctatgaagagaagcaggtggcccgcgggggcggagggggcagcggctgctacactgaggactactcggtgagtgtgcagtacacgctcaccgaggaaccaccgcccggctgctaccccggggcccgggacctgagccagcgcatccccatcattccagaggatgtggactgtgatctgggcctgccctcggactgccaagggacccacagcctcggctcctggggtgggacgcgaggcccggataccccacggccccacaggggcctgggagcaacccgggaagaggagcgggctctgtgctgccaggctagggccctactgcggcctggctgccctccggaggaggcgggtgctgtcagggccaacttccctagtgccctccaggacactcaggagtccagcaccactgccactgaggctgcaggtgagagcaggaaatggcagtaggtcagagcaggagtttccatcagggtcgtcttgtcttctgtcttaggcattttctgaatgacttcttttgtgtccttggttttaaacaccatctgaggctgaagacttccaagggttactcctcagcctggccctcccttggagttcagacccattgagccctctgcttccatgatctcgggatctctccccaagatgcctgcagcctgtcatgtccacagcagtactcatttccccctctgccctgctccccatccgcatgctcacaccaaaaacctagcaccagctgggggtagtggctcatgcctctaatcttggctcacccaaccactttgggaggccgaggctgtggatcacttgaggccaggagttggagacagcctggccaacatggcaaaaccatggagtcggttcatgactcctcatggctgggatattatgtaggagccacttcataaacattctcgttactcagtacaaaagttagccaggggtggtggcgggtgcctgtagtcccagctactcaggatgctgaggcaggaaaatcacttgaacctggttggcagaggttgcagtgagccaagatcaagctactgcactccagcctgggtgacagagcgagactctgtcttaaaaaaaaaaaaaaaaaaaaaggcaggacccagtggctcatgcctgtaatccctgcactttgggagggcaaggcgtgtgaatcacttgagttcaggagttcgagaccagcttggccaatatggtgaaaccccatctctactaaaatacaaaaaaattagctgggcgtagcgggcacctgtaatcctagctactccggaggctgaggcaggagaatcgcctgaacctgggaggcggaggttgcagtgagccgcgctccagcctgagcgactccatctcaaaaaaaaaaaaaaaaaaacctaggccccatccctgtgcccaccctgccccttgcacttcagcctcctgggcttctcaacccgcctgtgaaggaccccagttgcttgtttttgcctcagtccatgaaaatgaattcccagaaaatgaaacttagcaaaagacatgtaagatacaagtccaggtattttattattagattcaacagacatcagattgctacaagatttccaaacatgctgtctcagtaataaactggagtctagcacctctgagtagcactgcaacaagatctacctgcaaagtacatcccaaatgtatctacttctctgcactcccactgctatcccctcagtccagtctcattttcctctcttcgggacagaggcaataacctctgactgatctgctgtcactggtcttgccttctattccacttggaaccagagtggccttttttgaaacataagttgatgtctttgtgctagaaaacccttcaatgacttgccattacctttaaaatcttaaaaatgttggccgggtgcggtgattcacgcctgtaatcccagcactttgggaggccaaggcaggcagatcaccaggtaaagagaccgaggccatcctggccaacatggcgaaaccccgtctctaataaaaatatgaaaattagccgggcgtggtggcgtgtgcctgtagttctacctactcgggaggctgaggcaggagaatcgcttgaacccgggacgccgttgttgcagtgagctgagatcgccccatcgtactccagcctggcgacagagcgagactccgtctcaaaaaaaaaaaaaaaaagttaactcctggctgagtgctttggaaggccaaggcaggaggatcacttgaggccaggagctggagaccagcctggggaacatagaatgaccctatctcttaaaaaaaaatttaaaaaaaaatttttttttaattagctgggcacggtgacacatgccattagtcccagatacccaggaggctgagcccaagagattgaggctgtagtcatgatctcaccactgcacttcagcctaggcaacacagcaagaccctgtctcaaaaataataataaatgttagcatctcactcagttctgtgtgatccagctcctgccaacccatctgatgagctcctggttcactctccttgcttcctgctttcacctcctgtggcccctgtcccgttcttcccatgtgccaagctcattccagcccccagacctgtccgctacttttctcctccagatcttaggttaggtaacactccagccccctctgagatcacctacacaccttctgttcacttctgtcatcctattgctaaattactttgtctcaaggttcgtaatctctgtgagggagtcctctctgctgcttttcccaaggcctgacgcacaccgggcacccagttaacatctttaatatattgggctttcgtgctacctgagggcttctagaaagctctctacatccaagtgagaggctggctctccaggaggtacctgtgctctcagcacaaatggagcccctctgggaacaggaacctgcttcagccctttagcatacacaggcctgccacatgctggggacagggccacctgagtcccttgcctggtcccatgtgtggtgccagctccctcccctgatgattgttctctctctttcccaggaccgagatctcactcagcagacagcagcagcccgggagcctgagctcaggaggaactcttacctggaaattgggaactgtatggagactccaaactgacttctttcaaaaaacaaaaacaaaaaatttttttagctttgacaaacacacaaaagtggtaataaagagagccctccttgtcaacccaaaatgtgagccccctgtggcaaaaccaccccctaccccattaacaaatcaacagacaaaattctccgagtcctttgcctcttttgataacatgttgttctgttttgtaaagtgtgtgtgcttggggttccgaggtgtgggattgagttctctgctttgtttttttttaagatattgtatgtaaatgtaaaaagttatttaaatatatattttaaagaaccctaactgccaacttttgctgaaaaagaaaaaaaaatcactgctgcattaaatgaaccacatcatgtgtagatactgttgtctccctgaagggagctcaggcctttgaaaagctcagggcttcacctgccttagaaaatgaaccagaaacttgaagtaaagctagttgataggggtacaggctctgaggagcagtgcaaaactgcctctttctttctcgtggcaaatcccaatgtacacgatttcaggtctcagacgccatgcctctccagcccacgcctttaggcaggtgatggcagcagctaggaatagggtgtacatgatccacagccctgcggagccaggtcaagccgctgctatgaaagctccagggtgatggggacgattctgcccagtgtcctcagtctgtcccctcaggtcatggtcccaagtgaaatgacagagttcacagccctggtcttggctgaggtccaggtcatagtaagggcatgttcttggggccctcgacctgaactctgaccctccgggcagggaagaggaggttgtcccctttggttgtcctggctttggagtcctttgcaaaaatattttgggccccctgccactggctgcagaaatggctcgacggggtgtgtggggacagacacccagaaggaatgtacttttgtggccttggtgtccgatggggctgggggagagtgctctccactgacccagcagcacacccatgtgcagtgcgcctgcatctgtgtgggggcagccacaccccttggctgctgcttccttgggctgcctttctgggggcatgtgactggacctacgaggtctgcactgagctccatttgaatgatacctttcctatcccatttcccccacggaagcaccgcttcagggttattcagtcctctgcctcatggctgaaattgctcatctcgtctgcagatgtctactatcctgtctacctaatgcactattatgtattgattctccatgagacagagagagagagagactatcagatagtttacacccaaagggtaggtttttgtatatttttccagccttttttattaaggggaaggggagagtttaaaaacccaaaccgttgtggttttaaggtgtttcatttttaaaagggagagagaatctatttaaagctatttcagatcagggattgtcatccttttttgtccaatgtattccttgttctttaaaaaaattttttttagaggaaactaatattagtctttgtgttcactaactcttctggtcacttgtatttatttattcattcattcatcagatatttgttgccatctgaaagaactggcccagtgggtctgaaagctcgcttgagaataggaaacttgagacctggccccctgtgggtaggagaacaaggaccacctgggttctccagtcttgaacgagaatctcactcttatcagaatgtttttcttaacctcagcgtatgatgaggaaatttacttatctctagctaggatttgacaaattccaacatcaaatgatcaaaacatttgccactgaggcttcactggtgagatccgttctccgtcctcgggtgcagtcccttgggggctgctcctcggactgcgccccgcacacctgttatcgagggtgtgagaagcgcctaagctggtgacatgtgatctgggacgccttcatttctcgggccaggagtagcagctgctaaggacagcagcttgcattgcgtggttttagggaagcagggtctggcttttaatatgaactgcaaaaagcagcttctcactgatatttttttgttgttgtttctggggggtttttttgttttgtttttaatgcctttgagtgcatattttcttcctcgtctgaaaccgaactcccaaagtggctttctttagccctggctggaaaaccacctctcaatagccttaagcaataaatagatgagtagagaatgtggcttcaactgggcttattaaagtaagtgtgtctagttttcacttgaacaagtgatagctgcagatggcgaaagaaacccatttaatttttgtagcttacaggtggtagaaacaaaaatgcaattttaaaaccttaaataccaaataccaaccattgccttttttttttttgagatggaattttgctcttgtcacccaggctggagtgcaatggcgcgatctcacctcactgcaacctctgcctcccgggtccaagtgattctcctgcctcagcctcccaagtagctgggattacaggcatgcgccaccacacccagctaattttgtatttttggtagagacagggtatctccatgttggtcaggctggtcttggattcccgacctcaggtgatccgcccacctcggcctcccaaagtgctgggattacaggcgtgagccaccatgcctgcccagcaataccaaccattgtcttttaaattcgtgttggcttctcagacagggagatcactggaataaaataaccgatggtcttattttgtcacacgtaaatcaaaagaaatgtcctctttgaagttgtaagactccaccaatgacagacacccttttcggtggactctgagtggtgtgtagtggttttatagccatggaaactaggagtatctcactttccactgagaacccctgcccccaatccctctaagttggggtgtggcagttgggcagggtcaagtgacccagccctggctgtaggacagccatatacagtgaagagttctagaaccagctaaaaatggaagtttgggtgtttaccaacaaggtacctctttatggatgcagccccagtaagctggctttaactctcagctccttccctgtctcctcctaatccaagcccttttataaaataaagccccttctgtcccactgctcacatacttatgtgctgctagtctctactcgaagttcgtgcaggactaatgcttttaaaatgaggtctaaaaaataattactagtcgagactattattctttaaacagaactgcctttttctactctttatgtaaactctttctattgtgttggtctaacaaggcactattttaaaattttttaatttttcccatagcacttaaaagagattttgtaaagaccttgctgtaaagattttgtaataaaatggtctaagggctctttttccaacattaccatttttaaaaaatgttttaaaagctagaagacaacttatgtatattctgtatatgtatagcagcacatttcatttatggaaatatgttctcagaatatttatttactaatatatttatcttaagccatgtcttatgttgagagtgtgacattgttggaataatcattgaaaatgactaacacaagaccctgtaaatacatgataattgcacacagattttacatatttgcagaccaaaaatgatttaaaacaagttgtagtcttctatggttttgtaacaaattgtacacatgactgtaaaaaaaaaatacaattttatcaagtatgtgtt

SEQ ID NO: 297 - DNA, 135477 bp, Homo sapiens
ccgcagtggcgcccgagcgcgccgcctcccgattgactgctagcgctctcggcttgtctcgcgcactgtagctgagccaatggagttactcgtagtcgagaggccggcatcactggagtggtggcgcagctgtttcctccggtaggtgtgaggctgccatcttgtgtgtggctgggactgggcttcttgggggttgaaaacatacatagcgcctggccgtagtggaggggtccggagagaacaatggggtaaaggagaggcctaagggaggagacccagcgccttcctacttgcggaaaggatgggtttcctgggcctgagtctcatccctggctagagagagcgaggaatggtggtggtggtggtggtgatggttgtggtggtggtaatagtagggatcccaggttttggtttgttgatcattgtgggggctgggcggggcctttgatgccttaacattggttcctgggagctcttttagtaatttttgtctcgcaaagattctgaccatcaaccccctttgacaaaggaggctagctgatgaactgcctgattgagaaaggagcaaagctagtagtggaaggggagtgcctctctactatcctcaggttcagaagagacctcctcttccgtccttttcgagggagcggctgctaaacagtttgctcttcgcgggggttactttactaaggccatcctttggtaatagtgggcgtcaagttctgcgtttgggcaaaattgtacattagcgggcagccaagcattcctgcagctgtcttttttttttctttattttaagctagaaagtggtggtcttgcagaaacggggcgtgaaggaagaattttgtcaaatcttgatttccccgataacgatatgttgaagattataaatctctgggtctgccatgacatgcttggtcacttcatggagcaggaggaggctttgttagggaaagcaccttaatttctgagctctttttggggtaggaggaagaagacaggacttaaccttgtttccctcctccttttttttttttttttttagcattgttgtggatggcattgcattgtctttcatttgaggggaaaatgtattggatctgaagaccaagctgatgaaaggctaatattttgtggtagattttagcagtttgacttgcatgaaaagaaagccgatgtattattgccttcagcttagatttcagttattcaagattaactgatgaacaacctaatcaacaatacatgataaagacatctcgcatcaggaataccaaaaaacaaaacaaacagcaaaataattgatgttttttttttttttttttttttttttttttttgagatggagtctcttgtcgcctatgctggagtgcaatggtgcaatctcggctcactgcaactctgcctccgtggttcaagcgattctcctgcctcagcctcctgagtagctgggactacagacaccggccatcacgcccagctaatttttgtatttttagtagagatggggtttcaccatgttggccaggctggtcttgaactcctgactttagatgatctgcccgcctccacctcccaaagtgctgggattacaggtgtgagccacggcacctggcctgagaatcatttttcttaattacttgattccatgcttgtatcttccacttgacttgtatcttccagttggcttgtcaaaatgcatggagaaacaaaagttcatataccttttgaccttttctaagaaacttgtaaggaaatagagatagaatcaaagctttataatcacagtgtaattttgttcttgtgaaaaattggaaataacaaatatctaatggtagaagaatggttttataaattatgacacatcccatcattatatttttcagccttttaaaaggaacgttttcaaagagtagtggcataggctgttgaatgacataggaaagtggttaccattttgtgttaaatgaaagaagtatagaatagtcattgggaaaatgcaaattaaaaccaccgtcattggaaaaatgcaaattaaaaccacagtgagatactacacaacctcttactcagaatgtcaaaacaaacaatacatttcctggcaaggatgcaaaacaaggagaaaccttagtcttgctggtgagactgcaaatagtacagccacctagaagacaatttgacagtttattataaaattaatcatatccttatcacatgatctggcaagcccactctagattgaaatttaccaccaagataagagagttccagtagtttttcatccttgtcagcacttggcattatcagttaaaatatttagcctttatatgaggtatgatggggtatctcattgtggttttaatttcccctttgatgattgtatgcttctctgatgaaaagtgaaatgaaaacctatattggctgctctgcaaatatttatagcgattttatttgtaatggccaaaactggaaacaaccagattccactaggaaatagatttttttaaactccagcatgtccatacagtgtaacataggaacctcctttttattttctttagagatgggatctcgctatgttgcccaggctggaatacagtggcatgatcacagcttactgcagccttgaccccccaggctcaagtgaacctccctcctcagcctcaagagtagctgggactatagatatgtgccaccatgcctggctaattttttggagagatggcatcttgctatgttgcccaggctggtctcaaactcctggactccagtgatcctcctgctttggcttcccgaagtgctagcattataggcataagccactgtacctagccgggaacctccttttagtatatagttatataaatatatgggaaaagggaatatatatatatatatatatatacactaaatcattataagaaaatcatcaaaataagccataaaacattgcacgagattatgaaaacataccccaaaaatgtggccacaaagcagatgaaaatgacaatctaaatatttcagagtaagctaagagaatttaaggaaaagatgaaatctttgaaagaaccacataaattcagaaataagagctcagacatgagatacgtaggaagttctagccagagcaatcaggcaagagaaacaaaaggcatccacataggaaaagaagtcagactatctctcttggctgatgatctgattgtatacctagaaaaccctaaagactccaccaaaggctcttggaactgataacttcagtaagtttcaggatacaaactctgtacaaaaatcagtagcgtttctataccaataatgttggagcagagagccaaatcaagaatgcagtcctgtttacgatagccatacacacacacacacacacacacacacacacacacacacacacactgcctaggaatacctctaaccaaggaagtgaaagatctctacaagaactacaagacactgctgaaagaaatcattgatgacacaaacaaatggaaaaacactccatgctcatggattggaagaatcaatatcattagaatcgccatactgcccaaaacaagctacacattcagtgctactgaatgtgtagcttgtttcaaattatactttgaggctacagtaaccaaaaaagcatggtactggtacaaaaacagacatataggccaatggagcagaatagagagcccagaaattaagctgtacacccacagccatctggtcaacaaaattgacaaaaggaagcaatggagaaagaacttcctattcaataaatggtgctgggataactggctagccatgtgtataagactgggcttctaccttacaccacatacaaaactggacttctaccttacaccacatacaaaaatcaattcaagatggattaaagatttaaatgtaagaactcaaacagtaagaatcctaggaaaaaatctaggaaacattctggacatcagccttgggaaagaatttatgactaagtcttcaaaagcaattgcaacaaaaacaaaagttgacaagtaggacctaattaaactaaagagcttctgcacagtaagagaaactattaacagagcaaacagataacctgcagaataggagaaaatatttgcaaactatgcatctgacaaaggtctaatatccagaatctataaggaagttaattcaacaagcaaaaaaaaaaaaaaaaaaaacccattaaaaagtggtcaaaagacatcaacagacacttctcaaaagaacaagtggccaataaacagatgaaaaaatgttccacatcactaatcatcagagaaatgcaaatcaaaaccataatgagacatcatctcacgccagtcagaatggctcttactaaaaagtcaaaaaacaacagatgtgggcaaggctgcagagtaaagggaacacttacacacggttggtgggagtgtaaattagttcagccactgtggaaatcagtttgaaggtttctcaaaaaactcagaactaccatttgaccagcaatcccattattgggtgtatatccaaaagaaattgttctaccaaaaagatacatgcactcatatgttcatcatagtgctagtcacaatagcaaagatgtggaatcaacctatgtgtccatcagggatagattggttacatatgaaccgtggaatactatgcagggaaggaatgcaataagtgttgaaaaactaactgttgagtataatgcccagtacctggatgacaggatctgtcatactccagacttcagcgttacacagtatacccatgtaacaaatctgcacatgtacccccaaatctaaaagagaacttgaaattataaaaaagtaaataaaattcacctctttctatgttttcaggggaaaaaaagaaatgagatggctagaccatagaaggaggtgcaatgagagcagacaaaactcaataaaagattaagaaaaagacagtttaaagtgatgattgcattagaaaccaagagtgaatatacatcacagaaagtacgataagaaaaatggaaaaatgaagaaaataaaaagatttttaaaaaggagtcaagaggtgacaagacaggcaaagagagccagaataaatataaatggagttccccaaatgtaagcccaaggatagtggtgatgtttatgtaacactgaatatacttaatgccacttattgaatactttaaaacagtaaattttatgttccttattttactacagtaaaacaaagcaagccaaagcaatggaccagaacaactattaggactgtaattcaagaacgcttaacattaaagtaggtttaaatgtaacatatgttgaaaggcatactgtaaacctggagaaatcaacccacaacagttaacactgagatgtggtcctgtaaaattgttggatttttaaaaataaacccttcttgcattgatgggggaaataaaaagagcaggtcacttgcaaagaaaatcagattggatttttggtggcaacattttatgtcagatattaagaaagtatttattcaaagaaataaaataattcctatctcaccaaactacccttcaagaattcagggcattgacaaacatttataaacatgaaataattcaaggaaaatggctataattgttcccatgaatccttctgaagcgtatactagagaacaaatttcagacaaccaagaaatgattggaaaatcttcaacataaggtcaggtggtgagcaaatcaaatatattttgtgtgtagcatcaagattaaaagatgaggataatgatgatagaatagtatataaatattacatggtctgacattgtagaaataatataacccgcaaaaaaatgggaggaaaagaggagggtgaatgagaagtagaataaggttgtttgccttttaggcattagctgggagaaaaaagcccttgaagctgacaggtggaagcttaaacatactcagaagtgcaagatagaacactaataaaaataataccagctggacacggtggctaatgcctgtaatcccagcactttgcggggctgaggcaggaagattgcttgagcccagaagtttgagaccagccatcctgggcaacatggcgaaagcttgtctcttaaaaaaaataaaaaataaaaaaattaactgggcgtagtggcacacacctgtagtcccaggtacttaggaagctgagagaggtcggaggatctcttgaacgcaggaggtcaaggctacagtgagctgtgattgcgccactgcactccagcctgggcaacagagtgagaccctgtgtcaaaataatattaaataataaccagcaatttgcagggaagcttaaatttcgcttctgaaggtttgataactgagttggctgaactaaactaacagtaggttaacaagagaaaacccatacaaatttattgatatgtaagcatacattaatagctagcaaaatgtctatgggcatgcagggaaatcaacactgcagtctagcagaatccatggagaagtggcaagcaaggtggagactgtaaaaaaagaggagaggttgcaggacctaggggtagcagaatacagataattcccagaaagagaaagccccaccctggatagagaagtgagaagaggtgtaagatccattagacaaaataagagacttgaaagaaaatgagaccaaagacgcagtctcatgaaagtactgcttctggggaaaggaaagagggtgccttggaagggtcaccatctacctggaggcttggtgatagagagaaggggtagtagaaattaaggatcttggtgaaccagaatagaaaatagatactcatttctcccacccaaaaaggagtcattaattaaaaacaaacaaacaaaaaaacactttattaggtactatttactaagaaatccagttaagtcatctaaattccttgcttctgcctatacacaactatatctggtttaggaaaaataaaatatttcaagatgaacagaagatggcaggcaacatccatataaagttactttagctggaaaacaaaatgatagtcaaaacatttcaactgggctgggcacagtggctcacagctgtaatcccagccctttgagaggccaaggtgggcggatcacttgagcccaggagttcgagcccagcctgggcactatagtgagacctagtctctacaaaaaataaggaaaaaagtttttaaaaaattttagctgatgaaaagtcttcccgaaacatccaactatagcactaaagaaaactacagcacagtactcctaccagaatttaaaatatccttaaactaacatttgtagagataaaaagtctcaaatccaaattcaaaactgcaaaacaaatggacaaaaagaggaagatatgaaaagtgaatttactgaactcaggaaataaaataaatcaaaagaaaaatcagcttttaaaatgaagttaaagccagatgcagtggtgcatgcctgtagttccagctatttgagaggcttgagcccaggagtttgaggccagcctgggcaatatagagagactcctgtctcaaaaaaaaaaaaaaaaaaaaaaaaaaagtcataaagaaagaaatgaagctaaattccaaggtacataagaaaagattggactgaatataaggagcattgagaaaaggtatgaaaacaaccaagataatgaaaattaaatgaagaaaggttaaaaagtaatagaaagtgattgatatagaaaataagtaaaagtagagttcctaagaagaaaaaaacaatagcaaagctaatagttaagtttcaatccatgaaaacattctggaaataagagatgactccaatctacatgttgaaaaggctcattgtgtactgggaaaattgatccagaatggtcagttccaagtcatgtcctagtaaaacagttggactttcaaaatgatgaagaaaaattcctctgggcttccagacagaaaggagaggttagcaacagacttctaaacagcaacatacaaagcaaaacagccatggaacaacatgtttaaagtctacgaaagtataagccaaagattttataactatgactcattcttaaagaaaaaccatgataaatcctactatattaataaaaaagtatttaaatagtgaaaaatgccacgagcaaagtcaaaaggcaagcgacaaagcggggaaaaatatttggacttatatcacaaagagctaacctcctggatgaaaacaccttcgtaaaattccaggcaagtaagaccatcaacccagtaggaaaatgggccaaagatatgaaaaagaaatgcacatgacagacatataaaagatgttccagactgggcgtggtggctcacacctataaccctagcactttgggaggccaaggtgggcagatcgcttgaggtcaggagtttgagaccatcctggccaacatggtgaaaccccacctctactaaatatacaaaaattagctgggtgtaatggtgagcacctataatcccagctactggggaggctgagggaggagaattgcttgaacctgggaggcggaggctgcagtgagcccagatcatgccgctgcactccagcctgggcaacacagcaagacttcatctcaaaaataaaagatgttccaccttcagtcatacaaagaaaaatataaattaaagctatgttaaagcatttttcaacaaaatccaaaagttatacaataggccctgtagactgtggggaaataggcactttgatacattgctggtaaggatacataagcataaactgcatgggagggaatagtcaaagggaggttagtcatagcagcatattacttgcatttgcaaaagattggaaataactaaaatgcccattaatagagaactgattgcataaactaaggtgcatccagacagtacaacagtctgcaggtagattgtgccccttccaagtcaccgtctttccatagaggtcataaaaaagaagggagaaagtctctatataccaatagagaatgatctgtagaatacaataggaagtggaaaaaacaaaggcatggaaaagtatgcaatgtatccgcagaaggaaggagcagggtaaaggtgccaacaacagaagagagatttctctaaatggaagttgtttctatagttttaaccctaaatcatcatgtatgtctacatattcaaaagtgggattaaataaaaaagtagaatgaaagaaaaatctgaaaaggaaatgaaacaagtttacacatctatatcgcattttggtgacataaccacacacaaaaaggaacaaattctagtggctctagaacatagattttgaaatgtactttcttggtgggatatattcagtagtagtagtagtattgatgtgctgctattttgaaggcattaagtgttgcaaaatgtttttattttttattttttttaattttatttttgtagagacaaggtgtcaccatattgctcaggctggtcccaaactcccaggcctaatcctcctgcctcggcctcccaaagtgctggtattacagtgatgagccagtacacctggcctaaaatgttgatagttgttggacaaaaccataaaatttatcaaggctataacgtaagaaaatttagtctggaaattcgtttgactgagtaaagtgaaaatgaagcataaaattacacaggaaagctaacataatagagtttgtgttatatggtagacactttgctgacactatatatatatgctatatcatttgtttcttgcagctgtacattgagacccatcttattttcccactaggttcagagagattaaaaatttgcttcagattagccagttactaagtagaagattgagatttaaaaccagattgatgtgactccaaagcctgtgctgtttttcctacattattgcaggatatccatcaaatattgagaagaaagaatatcaggagcaaagtgttctaagttgctgttcagaacgtaaagatgcgaaccccaaatcagtggtttgttcattcttcatgcaagagcaatgcactaaaggagagaagcgtaagttttctcttatttctgatggggaaacaagcacacgcatacacactcttgtgatggagatagattttacagaaattgtcgctggtgactgaaattagtaaaggtgcgaactaaaagtggtggagtagaaaagaaaaaatctagcaggcatgggttttcatgatgttgttaaaagcaagaaacccttcaaagcttccctttatgacccttcagtgctcttctatgttttgtgctaggaaacaatagaaatatgaaagagctaaaattttactgaacatctaaggggaagaaagcatccttcagtcaggaaagccttcccacagcctttttgtaaacactgacctttaagatactagtttaaataaattgtgtttcttccttttgaagatgggggctgttggagatttcagaggtactagagcgccctttacccaaactaacgctttatgtttccactggtttcccttgatgataaatatatttttcattcagttcaatactactgtttgaaaggtctgccacttgagttattgggatatgaaaatttacctgttttaatttgatgtattagtatttgattatgatggaaatttaatttgtaattctgtatacctgaaagcaataagaaaatatgttggatttactataaagactttaaaaattaattttaaagcttttctttttgtcagaagctgtggtgatcagtgactttggtgaaagctaagaaggttcaaacaaatttgcaaatgatatacaacttctaaggtaagctagtatgatgactcaatcaagattttaagtgctctcgacagacgtgtagactatgctcaacataccaaaataaaatgtatcaggaataaatataatattgtatttaaatgttataaagcagttgcagaaatagtagactgatttgtagcaatatgatagactagagagcctgaattcctccctccaccaaacatgtaaagtactagattcagtataaaaaatatcctttaacatgaatggatgagcccattaagaaaataagggaaactttctggggctagaaacaaaacaagtataatatatcctgtgagataagcaggtgctgaagtcattgaatactttgggggcatccatggatttctgttggcattgaagctttgtgtaaggagcaggatgaggactagagaaaaagatccctgggtcccatataaaggtaagaagcctggtcagagaccatcttgcaaagatattcagttctgggtagacttaaaatcttccctaataattcttggttatcagctcacattcacttgaatttggggccttaatttacacaatttttacagtttctaaaactccacaagtggaggattttaatttaaattggacctcagtctgtaatactctcaggtaccttgtaagaacaataaaaaaatcctccatggaggaatgtacgatcaatgcattcatcaaataattgtagttaaaattctaacaaataagctcatacacattttttaaaattacaaaatgtaacaagggagaaaacatcaaaacaccaagagcaagagtcagcagaaacagcaaacaactgaaagagatctatagagatttcgattattagaaatatacattacatgaaataaatatgtttatggccagttgcagtagctcacacttataatctcagcactttgggagactgaggcaagaggatcgcttgagcccgggagttcaagaccagcctgggcaatatagtgaaaccctgtctctacaataaatagaattagctgggtatggtggtgcgtacctcaggaggctgaggtgggaggattgctggagcctgggggtcaaggctgcagtgagccatggtcacaccactgcactccagcctgggcaacagatcaagagcttgtatgtatgtctaaatatgtatatatgtacatagtttaatatgttcaataaataaaatagggattataaaataaataaagagtaaggggctataaagtgaccaggtacattaaaaaaagaattggcaagaaataaatactcgtttttttgttctgcttttactcagcttagttattctgagatttatctgtattgtctgtaatgtatattaatagtttattcctttttattgccaagtagtatgtcactttatgaatataccacaatttgtttatctgtgctgtgtagatggagatgaattgtttctaatttttagctaatacagataaagatactatgaatattcatgtataagtttttatatggacatatgcattcttttcttttgagtgaattcctgggaatggaatggtaggtagattttttttactttttgttttttattttattttttgttttttatttttttttaagacagagtctcactctgttgtccaggctggagtgcagtggtgcaatcttggctcactgcagcctccacctcccaggttcaagcaattctcctgccacagcctcataagtagctgggattacaggagtgtgccaccaagcccaggtaattttttaatttttagtagcaatggggtttcaccatggtggccaggctggtctggaactcctgacctcaagtgatccacccgccttgacctcccaaagtgctgggattacagacgtgagccaccacgcccagcctttttttattttttaagaagctgctaaaaccgttttccaaagtagttattaacaggtaattgaataacaaaattgtggtatatctatacaatggaatactcctcagcaatatttgtaacaaagtggatgaaccccagaacaattacgctatgtgaaagaagccagacaaaaaagaatatattacacttattaaaagttctgaaaaatataagtgctgtattgcaatggaagcatatcaaatgcagaggagacaacaaggaaagggaggaaaggaattcaaagggacaggaaagatttaggaggttcactatcttgatgtgatgatggtttcacaggtaaatacacatatgtccaaactttttgagttgtacgctttaaatatgtgcagcttattgttaattatttcttaacagaacactttttaaagaaacaaagccagaaaatagaaacagtgaatagaggaacatgtcttgataataattcatgtgaaaggcttgcagattgagtttctatttggattatatgactattaagcctttcagtgcaattctatgaaaataggaagagaacaggtatgacacttgcggtattaacaggaattacgaattaggcttcaaagatttgataacatcagcaaagatagccttaggcagccatgtcgataccagtctcacctccagatcagaaacatccagaccctgagaccagacaactcacctagagtgtacttgagaaaaagtttagtctctaggataaaataagaaataactaaaatcattaacttcctaaataaaggagagtgggagtaccacataacaagcacaggaagctaaaaaactcttgaaaatgattggtgaaaaaagaaatgtatagttagtaggaagaattaattgaaaaaggagaaaaacccagtaacttttttccctgccctatacgccagtggctgaccagtgccccttctgaatgacccatttgtcttctaaaatagataatgttagagcactttcaattaggttatagccaccttgtgtgggtctgggagctgttttgtctcttttaggtaatgtttacgtatgccttactgatttcctatggcaaattttatagttaaattcacagcatttatattatttatagtagttccacattatttgggttatcttaatccgcccaactatctatagcagttagcagcatgcaaaagggcatctttagttaagtgcaatttttgaattgtgcaactaaatttaaattgaatatcatagatcaaaataaaccccaggctgattaaaaggagaataagtattatagctggtagcatgtttatcaactttttggacagctagtaacttttccattttggagtgaaaaaacaaaacaaaacactgaagagcattttatagaatagaattattatataactttttttgtacaaatgaatgttggttaaaccaaaataaaaaaggtaacattagaagaaatatttgaaccaaataacaaagcatgtttatgagaaataacttattaaattttataagaaaaatctcaagactatagtaaatgaaatacagatatgaatttatagttctcataagaacaaagtgaaaaacacaaaaaggagtgttcaatcccacaagtaatcaaataaatgcaaattaaaactataagagaacattttatttcattctaaataagcaagaattcaacgaggtacttggggatggtgaggttttggtgaacctcatggtatactcatgctggtagcatctttagttaactaaactatattaaattgcttttagaaatcagcatatagcaaggttctaaaaaatgtatgtatgttttgacccagtcagccaatttgtggtattttttcctaataaaataaactaagtaaggagggaaaaataatgcatgaaaatattttgataggattgactatgagagtgacaaatgggaaataacctaatgtcagtgatagagggttaagcaaattactgtagtattagtgttgtcaaaaatgataattttttgctgggtgcagtgactcatgcctgtaatttcagctatttgagaggctgaggcaggaggaccgcttgaggtcaggaattcaagagcagcttgggcaacataataagacctcatctctaaaaaaattttaaaaattagccagtatggtggcatgcctgtagggccagctactaggaaggttgaagcaggagcatcactctagtctgggagttgaaggctgcagtgagctatggtcataccattgattcatgtttcttatctgtaaagtggggctaacataataatatttgctttagttttctttcaaggctattgtaaagaatacatatgaacagtctggatattataaaatgctatataattatagtgaggaatattaatttagcattttttgtttacatttatatcaacttaaaaacaaattttcagacatctttgaagtaaaccatttaatttctggaatttagaaatatatattcaaaatatgtgattgtaatcattgacttgtttatctttgctatgctttttacttaacttttgtggtagaccgttgtctatgcaaaagtcataccaacctcctactttcctgctttctttttatgattgaggcaaaaaatgccacatacttatttttctaggctccttggcacttagtgggtaactgttttattctcttcaggccaaagagatatagaagtttattggagagctccctgaacaatattttccccctaagaaaagagaagttatgtgaagaagttccccctttccctccctgtttctttccttccttatttgggtgttgtaaatgagactctgcctggaattgccaagccactgcagcagccagcctccaagatggcccccaccacctgctggtatttgcgccctgtggattcattcttcttccatactgtgccaagactggtctgtgtgaccaataaaaaacagcagaatgttaattttaagattagattattaaagacattgcagtttccatctttatcacgcttttgctgatcacttgctctgggagaagctagtcaagtgagcatccctatggagaggcccaaacagcaaagaaccaaagcctctagccagtagccagtagtccttccagctccagtcaaacttcatgatgattgcattcctgcctgaggctgacatttgagtcagaaccattgagctaactactcctggattcctgactctcagaaactatgtgaaataatagatcttaagctatgtgttttaagcttacaagttttggataattgttacacagtagacaactaatttgatactggcactagaggttgattgatgcagtagactgattgtgtccccacaaaattcctatgttgaaacttaatccctaatgagatggtatttggacatggggcctttaggaggtgatcaagtcattagggtgtagctgtcatgaataagattagtgtccttgtaagagtcctgagagagcttgtttcgccttccactatgtgaggatacagcgaaaagatggccatctgtgaaccaggaagtgggccctcactggaccctgaatctgctgacaccttcatcttgggcttcccaacctcctgaactgtgagaaataaatttatattgtttataagccacccatctatgttattctgatatagcagttcaaatgaagtaagataagtgatgtcaacaatttttttttgagctagggtcttgctctgttgcccaggctggagtgcagtgatgctatcacagctcactgcagacttgacctcctgggctaaagcagtcttcccatatcagtctcccaagtagctgggattacaagtgtgcaccaccacgcccagctaattcttttatttcttgtagagatatggtcttactgtgttgcccagggtggtctcaaactcctaggcttaagtgatcctcctgcttggcctcccaaagtgctgggattgctttgggaacaatcccatatgagccatggtgcccagcaacaaatattttaagtgggcatggctttggaacttcgtagtggatgaaaggtgaatggacattgaagacactgtcagtgtaaatctaaagtatcttggagaaactgtagactcatgtttttttggtgaggttgccaggaagggcttaaaggaaaatgggagaatctttttagaaactggaggaaaggggatccttctaatatagtagcataagctttataatgcaacactgtcacctgtagtaatgtagaaactagaatgcacataatgaactgagtaccgtagctaagaagatttccaactagacttgaaggtgccacctggtttgtgcctaaagagtgacaggagcaagtatgctaaagaaaggattgataaacctgaaggtgctgagacttgatagttttgaccatgtcagcctctccaaacagtaaatgatgctaaattaagaaatggcttcttctaagtgaaagggagaaataataattttcctcaaccttcataagttcgtagttgggacagactcctgcagcaaaaaacagatgaacaagagagaaacaaacacgtatagtaatgctgcagtgcagttcacatgagagaaaagtaactcaagagtggcttagagtggtttagaatcccagctcatagaaaatcttcaataaagagcaataaattggctgggcgcggtggctcactcctgtaatcccaccactttgggaggccgaggcaggcagatcacgaggtcaggggaacgagaccatcctggctaacacggtgaaaccccgtctctactaaaaatataaaaattagccgggtgtggtggcaggcgcctgtagtcccagctactcaggatgctgaggcaggagaatggcttgaacccgggaggcggagcttgcagtgagctgagatcatgccactgcactccagcctggacaacacagcgagactccgtctcaaaaaaaaaaatattttaaagaagcatattttagggtgaaatattctggtttccttcttgaacaaggatcagatagatccaaggcattgtcaggaaaactaaggacaaagttgagagtgtggctgtaaaatcctttgttaaaatttaagaaagatctaagtttctgcctcagagtacttttcagtcacataaaagggcctctaaagaaagactaatggtgtgactgaccaatccattcaatcaaacaatagcgcgtccaagaaacttaaggggatggtccttatcctgcagccatttcagcagaatctcaaggtagaggagggcttatctgaaaaagatttgtgcgtgtggcttttgtttaatgcaaagaaccccagtgagattcctaggacccccacaaagctttaagaggaatgtattttaaggatcactactagtttggattaaaggggtcagagagtacaaaatgaaaagatgcctttggacccccaaacttctacaagtaggaagcatgatgagaaaactgcttagcagaaagcaagtgctacctttcattaaaaagaaagagtgtctcagagggctgaacctggaagatggatcccagagccatggagaatcatttcccgatggaaataggactgagtcttaacgaatttccagatttccaacatttccctctgtattttagtaacctgattctatgtactttgcatttccctccttttttgaaaaggattgtctgtaatgactatctcaacctcactaaaaattgtgtgggtcagtgaattaacttgcttctttagcccaggggttggcaaaccttttctgtaaaaagccaaatagtaaatatttttagctttgtgcctgtttttgcatagtttaccaaataattttgctaccagagctatgcattttgctatgtcttgattcatttattgtattcctacttggaaattattcccttggcaatgcacaactgaacttttatactcatctctatatacgtgtgtatagacatatgtatttttctacatatgcctatatttttgtatatggatattttgggtagcaagctttgtaatgatttctcctagtctgttacatttattcctataatttttgttttattgattgcataaaaagtttttatttttcatgtaaaaataaaagttttcaatattgaaattgtctttttcttcaggactcaaatttttcttctaaggtaaagtaaaaaaatgttctcctgtttagttattttttgacttttcttaggtttacttttttaacctcctgaaatatattaccatgtgcattgtgaaatattaattcagattcattcttttctaaactgacatcctatttcattatttatttaattggaattgctttgtgcttgttacattttaaattagttttactactgaaaagtttttggccgtgttttctgcttaatgcattcttgtggattttgtcaatcgtagctttataatggtgtaattctggtgaaatgaactcagtaccattaacttaaaaatatataatttgatattcccatcctctcattataaaatatacattaaacttatttagaaattcctgtcaggagcaaatctccatatacttatttattccataatatattcatgtattcctttattttccatcattggaattttttgacttttaaaaactaaattagtgttctgagaagttaattctcaagttttaaaataagttttatttcttaaaaccattctagatttacagaaaaattgcgaagatggtgcagagggttcccatatatcctacaaccagtttattaactgttacatattaacatgttacaattaatgaactaatactgatacatttttacattatcattaattagagtccatactttgttcaaattgtcttggtttttacctaatgagccttttctgttccaggatgccacgttacatgtagtcatcatgtctccttaggctccttttggctgtgacagtttttcagacgttccttgttttttatgaccttcacagtgttcagaagtgttggttaagtgctttgtaaaagtgttcctcaatttgaacttgtctgatgtttttctctttattagactggggttacgagttttgaggaagatcgcagaagcgcagtgccattttcatcacatactgtcaatgtgacttatcactgttgatgttgaccttgatcactagggtgaggtagtgttggtgaggtttctccacagtcaggtttccattacccctcttttcatgctgctctctggaaagaagtcacgatctataacttacactcagggagtggggagttatgttccacctgctaattacttggaattcttctgcacaggagattgtctcttctctcccgtttatttattattcaatagcttatgtcagtatggacttgttattctatttttagagatttttattgttaatagagtgaagttgctccctttttctttcctgtcaccaaagaataagaatgccattgaagttataacttagaaatttgccgaacagatttttctgtgtttgtcattttagttaaattccttaacttttctaggtctacaattactttttgttctgtttcaccttatagatgatgagctctttagcagttaatgcttatttatgtttgtgttctccatgtgttgtacctggtatatagttcttgttcaataaatgttgaataaatgcattaataaggttgtcgtgtatgggaagagagttgcttacttgtttttattttctggtttttatgaacttttacctttacagcaacttagggtctgacttccctttctctcctactaatttttactctttttttaaaaaatgatttattttattttttgtagggatgggagtgtttctctgttgcccaggctgctctggaactcctggcctcaagtgatcctcccaccttggcctcccaaagtgttgggattatagatgtgagccactgtccctggcctctaattcttactcttaattcagaattaggtacagctgttctgcttgcttcactagagttaggcttccagtagctgacctttattattatattttgtgatctgcacaggcatcatctctttaaggcagtggttctcaaaatgtggtcattggaccagcagaatcaacgtcccctggggacttgtttgatatgccaattctcacctgccctagatttatttaatctgaaattctgcggaaaggacccagtaatctgtttcacctgccgtccaggtgatcctgatgatactaatgatagagcatcaatgatctatggtatagtccttcatgagtagcacagctgtttcttcctctttttatcctcacccaagctgtatcacatttctgcattaggtctgtggattttgttttttcctagtttttacgtataacttggaaaaaattctgtacactgagaatgtaaaaataacattttctagtgttcttaaaaatgacctagtatcatctcattcataaattattttggtgagtctttccagtatattttttaatacttaaagattgacttttaaaatgcttttggtcttgtaagaattgcacggtaactaatattagagaataataaatttgagaagtgcaaggaattcattccggttgcttctaatcaacggtaagtttaagaaataaaaaagtaagggaagccgggtgcatttatagtcccagctattcaggaggctgaggtgggaggatcactgaacctgggagtttgagaccagcctgggggacatagtgagactcatccctcaaaaaaaaaaaaaattaagggagaaatacactttaaaattatatttatttatttattttgagacagagtctcgctctgtctcccaggctggagtgcagtggcacaatctcagctcactgtaacctccacctcccagttcaagccattcttctgcctcagcctcctgagtagctgggaagacaggctaatgccattatgcccaactaactttttgtatttttagtagaaataaggttttgccatgttggccaggctggtcttgaactcctagcctcaagtgatccactcacctgggcctcccaaagtgctgggattataggtgtgagccaccacgcccggccagaaataaatttttaaatgccgacttttccttgggctaaaattccttggaaatacttaactctttcctttatcacaaagtttataatttataaattagtaaaggcttttactgtataagtgcaatgtcagtggagtgttaatctgaagggccagaagattttgagaggaaaagaaaattgttgcacagtcaagctgtttcatctcagtgttgacatcttttgattgtctttaatcattcagtttgagatctttattggttcttggtataagttatccctctctccccgcccccatcaaacaaatggtatatctctttgtgattaaataagtgatttttgactgaaacttggacatttgtgtattattattattttttgtgtgtattatgttataagactctgggtcttacttaaatctgtgttttagcaggcaccctccaacactactgctgggggtagacagggttgcctcattaccaccagaggggcttggttctctccctgttctcagttgaccacctaggggagggggtttgcttgttactgctgggtagaggaggaggttcaggctctccactaggcctccactggtacccctctcattaggaggtagaggagtgccttattactgctctctgatggacctccactgacaccatgtggaggggaggccttggtactgctaagtggtggtgaaagtccagcactcaacaagtctcctctggcaccactcctgcagtcgggggaggagcaccttgtgactgatgcgtgggctgcaagtccaggctcctaaagtggtctccactagcgcagatgggaagggggatattagatcatgctcaagggggatgaatgtcccaactttccccttgttccccatttagggaaagagcttggggtgcctcctcttacagccagacagggatggaagtctaggctttccacttggtttttgctggtgggggtcgggtggagtttcacttttttctgtggtgtttgtctggagttatttattgcctttaagttttctgtcttgctgcccctttcatgttcctttggctagagaaagcagtctttttccaggggcgggcagagaggggaggcagtttctttgcacttggtgttcctgggttgctggcttcaccagtatccagagtgggatatagaaagcaaaaataagaaaattcaggatatcattaccatgttttctcctgggtcctgaggtccctagccagtttgtcgtctctccacctttcagaatccttttggttttagttgaaatataatgtacagatattttgctcactagttcagatcttattctttgcccttagatatgattattatttttttcttcatgcagatgtgttcttcgcttgctaaatttatttctaagtcccttagaatttactgttatattaaatgtaataattttttttctgctttgtagttctacttactgattcttgaccttatatgcagctatctttcaaattctcgtaattccaacagtaatactgatgcttagcatttctaataaagttagaataatgggtgttctagaattctaggatacattaattctatctcaataaagcaaacacattttatataataaacataatgtacatggcttttggttttacttagaagaataaagaaaaatatgtctacccagaagcccctacttgcattttattgtccaggactaagtcacactgactcctttagctgacattccagctacttgggaagctgaggcgacagcctggaaaattgagcttttatactgtttggcaaagtgatgaaataaacagcgttttgttagggaagaagtggagaacagatattggaaggcaattagctgtctctaatacattgataaaatatataactataactgcaaaatgctaataacccagcagaggagtagatttgggaacataagatgaaaaagtcaacaaggtgaggataaatgaagttgtatcattaaagtatatttatgcattatttttcagaactgaatttacttacatagagaaatatggcaagacaaatctatatgttagcctacttgtcagttcattggggcctcctttttttcttgacagtgctgtagaaatattaataaaatcttgtacattaaagaatattaaaataattgtcctttcacagatatctaaatggatgtctgcaacttccttaaacttgtcatcctctaatctaaagttaatgcgtttaatataatatttcttattttatgatggctgtgattgaataatgtgtttaaaacctggacaaattgaaacatagaatgaatttaattaatcctatttactgtttattgattcttttgacttaagtactgggattgctgatcttggccctggattttagagatagcttgctcttttgcaactgtggcattcttctatatgatatggaataaaagaaggaaaaaaagtagtttgagctctttgttcagatttggcggggtggggaggggaaggtcataaaatcccggttaaagttttctagatccaccatctcttgcaaaatatgaaccaaatagattaaaataataaagtttggggtttttgttgttgttgttttgccaattgacagtactgaagctgaatttgaaaactgtgattcaagcactggaaattttacattttgaatttcatttcttcttcttcctattttttgagacagggtttcttttctctctgttgcccaggctgcagtgcagtggtatgatcttgactcactgcagccttgacctcccgggctcaagcagtccgcccacctcagtcctctgagcagctgggactacaggcatatgccaccacatgtggctaatttttgtatttttttgagagacagggttttgccatgttgctcaggctggaatttcatattttttagtggaatagaactttatgattcaaaggaggaaaataagcttttgaagaacttttgaaagacttgatatttatcgaatagttctttgaaaatattttgatgactaagggtggttcacgcctgtaatcccagcactttgggaggccgaggcgggtggatcacttgaggtcaggagttcgagaccagcctggctaacatggtgaaactgcgtctctactaaaaatacaaaaattagccaggcatggtggcatgcacctgtaatcacagctactcaggaagatgaggcaagagaatcacttgaacctgggagggagaggtggcagtgagccgagatcgcaccactgcacccagcatgggcaacagagtgagactccatctcaaaaaacaaaacattttgatgaataaaatgtaaattaattaaaaacataaggttcttttcaaatatacatgaggtgaaagagtaaaaagcacatggcaaaatgatgcttttaaaatatgtttgcttggctgggcgtggtggctcatgtctgtaattccagcactttaggaggtctaggtgagtagatcacttgaggtcaggagtttgagaccagcctggccaacatggtgaaaccccgggctgtactaaaactacaattagccgggcatggttgcacatgcctgtaatcccagctactcaggaggcagaagaatcgcttgaacctaggaggggaaggttgcagtgagttgagatcatgccactgcactttagcctgggtgacaagagcgagactgtgtctcaaaaaaataaataaacaaaatgtgtttgctttattgagatagaattaatgtatcctagaattctagaacacccattgaagtgtacaagtcagtagtttttagtatgttcacagagttgtgtaactatcctcacaattattttagaaccctttcatcttcctgcaaagcagctctgtaacccttagcagtcacttcccctttcctctcaaccctcctaactctagacaactatgaacctattttatgtctctggatttgcctattctggacattttatatgaatggaatcatacaatatgtgaccttttgagactggcttcttagcatagtgttttcacccatattgtattatgtatcaggacttcattcctttttttgccaaataatgttccattttatgaatgtaccacatttatccattcagcagttaatggacatttttttttctacttttggggtattatggataatgctgctttgaacattcatgtataagtttttgtatgggtgtatgttttcatttctcttggatataaacctaggagtgggattgctgggtcatacggtggctgtgtttaatttctgaggaactattgacctgcttctaaagcagctgctccattttacatttttaccagcaatgtttgagagttccagtttctctacatttttgccagtgcttagtatgtctttttcattatagccatccctagtgggtattctcactttctgaatatttagcataatgacttgcagggttttttttaactcagattttaatttctggattgaaaacatgggataagaattctgcctgtaagcactgctgaaaacttcttggggaaaacataagaggctattacagttttatttcagtcttcccctgatagaatatccccatcctcttaagctcccaaaggtgtattttattgttattttctctttcctttccctgaaggtttttgcttccgttatttgcttctgttatttgcttctgccaggtgcctgagtccaatttagataatatttttaatatcgttaacatattattctattgtttatttacattacaggacatgttggcttcactgtagaaggaaaatgtaatttctatctggtacagtagtgttaaatagttaagttgggtatgttagtcatatttgcgggaattagttggggtttttggatggcctggcaatgcatgattgttttcctcatttaaaataggcagactgcaagtaggcagatgatacaaataggagtaaaggaagtgttctgaaattgaattgcagcgttgattacacaactctcctcaatcccctaaaatcattggctggtatactcaaataatgaaattttgtggtatgtaaatgatatctcaataaggctattttaaaaattggaatataaagtgcccactatctcaaaattaactattcaacactaatcaggaatggattactatccaaccattatcttaatcaggagtggattgggttcagataagagccagtgagattttagatgccaacataaactgtgagatctaattcaaatatctatttaggcatcaaagagaaacaccaaattactatagactaacatttgcttggttctatgtagaagattttgagattatcagttttctttttctgcttctaacaagagcatcaggatacgtaggacctcttgaccttctcttacatcttacctaattctcagtgtgtgtttttcctcctcagtaggcacattaataataataatcttagctaatatttatacagtgctcactgtgtaccaggcactattctgagtactttatacattaattcatttaatccttataataatcctatgacataggtatgttatttccattttacatatgaggaaataggggcccagagaggttaagtaatttgtccaggcaccttgtaagttgcagaggcagtacgtgaagtcaggtaggaggctccagagccagttttcttcatgactagatactccgttacatagtgcctacaggtccaggggaagaaagcactgtctccttgtcagcattgttcaaactgtggctttccactcactagtaggtcataaaatcagtttgctgagctgtaatccacagtttaaaaatattaaattgaatagcatagacaatatcagactgcatcagatgtggtaagagcagttgttttgtgaaacttttgctttacttgcacacatgttagcttgttactggggtttttgtgttagccgtattttttgttgtgggtcaggggcaaggtttgaaagcacattctgtagaagggcaatagttcttctatttggaatcataggccactggctctactttttctaaagccagtaacagagtgacatgttctgtcctcactacaacccagtttagttgcacctccccatccatgaacagtgagacagttggggtaaaagcaagactttccagaagatgtggttcagcataaatgctctttgcttgttaggaaagtcagtagtaaagttgaacatgtcagagtaagcctgagtgagcttctttctgagagaaagcattatttgctttgtaggacaaaaaacacaatgaaaaccaaaaaactccagttctgtctttatgagcttccccactcatcatctaaaagtcagcacttcctctctgtttttccttatgattagagacaaaaggcatagtagaaaacaggaaagtaatttataatttttaaaaaattagttggagatttattaacaaatatttgttgagtgcctaccgtgtacaaagcattattttaggtgctgaggatgaagcagtgagcaaaacacaccaacatcctgccctcacaaagctcacattctagtgtcactaaagttgttctgtatgaggtccaaatcagcacccttcctgtgcccttaaaactttactcaacatggggttataatggaaactcagaagtctataggcttcaccagtaccatagtgtagagtgtatagatcataaatatatcagagcccacatttttaattttattttaatttaattttttttttttccaagacagagtcttgctctgtcacccagactggagtgcagtggcacgatcttggctcactgcagcctctgcctcccagattcaagtgattctcctgcctcagcctcctgagtagctgggattacaggtgtgtaccaccacaccccgctaatttttgtatttttttttttagtagagaaggggtttcaccatattggccaggctggtcttgaactcttgacctcatgatccacccacctcagcttcccaaagtgctgggattacaggtgtgagccaccgcgcctggccacattttttattttttatttttatttttaaaatttctagagacagggtctcactgtgttgcccagactggagtgcagtggcatgatcttggctaactgcagcctcgacttcccaggcttcagtgattctcccacctcagcgtcccaagtagctaggaccacaggcacgcaccaccacacccagctaactttttgtatttttagtagagatgggatttcaccatgttggccaggctggtctcgaacgcctgacctcaagtgatccacctccacctcggcctcccaaagtgctgggattaaaggcatgagccaccgtgcccagcaagcctacatttttttttaatgcctacttaatggcgaaacaaagctgctccttttttaaaacaaattttccacttataaatgctattgtagaaaatttgattgttacagaaaattataaagaagaaaaaagtaatctgtagtcttactacccagagaaaattactgttaaaattttgttgtatttccttctagtcttttatctatataaaattatgcatgtctctgtacacacacacatagttgtatatatataatatttatgattttaaaatgaatttgaagtattagtcctatttcttgatttttatttaacatattttattatgtgactatatatggcacttaaaatatttttatatgtctataatattctaagatggtagcataacataatttattcaactgtttcccttttgtagatactcttggctttcctttgtaaataacattgcaataacatcatttaccatctagccatctctattttctcaggatagctttttgttagtagaattgatatgttaaaaagcatgaatattctggtaaattgttttctagaaaggttcctggggattttgttctactcagcagtatacaagattctgtctcactacattcttctagttcttatttaattttaagaactgttgctgcctctatttcttgaaaagaatgattcattttttataacattatgcttctttttactaaggcaaatctttcatctgcagttttgactctatcccaatggagaaattgttaatcttttagtaagcattaagaattgtatagaaaatgcagaatttgtttggaagaaaagcatggataattcatttgtgatgaatgttgactccacaaagggtttgttcaagtatttggagacggttgttaaattgccttttaaggaggtatgtccttgccgttggaagagtctctgttttgttgcagtttaggatgagttaggaatacatatttggaactagaagagatagagtttaaattttctgtttaaaaaagggaagaaaaacttgaaaggcacagggaaaatccagcaggaaaggaataggaactctggagaaatgctatgtcgtgtattgtgacacttcactgtgacctcacatataaaaacttacaaaagccaggaaatacttggtgtatctggatttcttgtagaagccagttaaaagggtgagtattggttgaaatgggaccaaaacgtgttgggccaagtgtacagggaatagctttttacctctctccaggcttcttcctttgacaacaaatatatgtgccctccctgtccaccactccacctcaaaaacttccctatgtatttcccttttaaccacaattttcttttctcccatttccctacctctctttccgtcccttttctactttcattccagtctttgcatttttgctaaaaaattttcctatgctgggatattgttcctttttctatctcactatatccaaatcctagtactttttcaaagtgcatctaaattcccatttcttaggtatttgctaacaaatcctcaggaaatatgttgttttagaagaatttataaagtctatgatttttgtacaattaaaaaagtcccatttctttcacttactccttttctttcctcacttaggtaatctctatattttaccttatgataaaatacggtaaaatataccttggtcccttgcatatttcttcttccttttgtattttcttcaaaactttgtattcaggtgtaatgattttatatagatagctaaggttttttgttttgttttgttttgttttgttttcacaaaagttgtacaagctccttgaagacagatcttttatcacagacctcttttgaattccttagagaacctagtatcacactaggcttctgaaaacaccaatcaagagttgcttaatgcaggggtcccttacccctgggctgcagacctgtacctgtccatggcctgttaggaaccgggcagcacagtaggaggtgagtggctggctggcaagcattaccatctgaattccgcctcctgttagatcagtggcagaattagagtctcatagacagcacaaacccttctgtgaactgtgcatgtgagggatctaggttgcaggctccttatgagactctaatgcctgatgacctgagatgcaacagtttcatcccgaaaccatcccctgcatcccaacctccaggtccgtggaagaatggctttccacaaaaccatcctctggtgcgaaaaaggttggggactgctggcttaacgtaattgagtaatagtggagaattagtgagatttagccctcaaacacattgggtatccaatgcatatccaaaggccataatgtgcagttaatttgaaaatgagttgcatgtgtaaattttcagaattattgataacattgtattgaaaacaatgacagattttgcatgtttatcaactgtgagaaaccaaaatatttaaaatgaaaaaaatgcttattattaggttggtgcaaaagtaattgtggtttttgccatttttttttttttaaatggcaaaggtaaattttatttatctgtattattagaataatacaaataatcactttatggctttttttccaaggagaattaacattgtgtttttaaattctgatttgtttatgttatcagtgactaattttaaaatagattataagatagcaaaacaaaaacaaaaaacaacaccctcacctacctgtatgtctatatatagagaagtggttaaacaaactgtagtacagcaatattaaggaacaccaatttgtgctgaacccctatcaactccagtggggatggcaccaggttctagaggccaaggagacccagagccagcaaaggagacagagggttttggggggagtttacatacagggaagagagtccagtggcagtgggctaggcaagagaaccaactgcttgcaacagtcatgcagtttacatagcattttcacttaatgccttctccctaacaacctccacctggtaaccttcatttaacccaaaacaaaggacctcgatcccttctatgccctgtgttccatgagccaggctgggggctcgaatgttcctcatagataaggaatgggtctccagcttatcccagattccttagctcaaaactgtgaaccacattcagggtcatcctcgggatatacttaagtcgagttttcagtgccaagtgcatctactgtgcaaccatgcaacacttttaaaagaatgagatagagctaccaaatgtagagaaatccaagatctactataaagaaataaaataaattataatgcagtgtgtatagtattatctcatttaaaaaattatcttggtgtgtattcaaacaaatacatacatctacgtatgcctggaaaaagggtctggaaggatagcactttgaatagtgcttaatcttggggaggggaattagagaagagggaggtgggggattttctttttttttttttttttctcaggagagtctctctctgttgcccaggctggagtgcagtgacgttatctcggctcactgcaacctccgcctccaaggctcaagagattctcctacctcagcctcctaagtagctgggattacaggcacacaccgccatgcccagctgatattttgtatttttgatagagacgaggtctcactatgttgcccaggctggtctcaaactcctggactcaagcaatccaccagcctcagcctcccaaagtgctgggattacagacacaagtcaccacaccgggctgggattttaaaacaatagagaagcatagaaaataaaaaatacttttttaatggacatttaatttaaaattaaaagataaaaagacatgtttagaatgagtacagctagaacagtgcactggtttgtattttatttgtaaaacaagatgccattctgtggttatagttattaaaactaattgttctgtgattaatagttattaaaggattataatcatttctcctatactagatcatgttttataagtcttcagatttgtggtaaaatatgttttataaatggaacccactataattactggatgaattccatagagatttttccattcagtaaattacctgaatatgttatattgcaaatgctatgtgtttgtttgccataaatggctttgactttgaaaattgtcatgtgaagtactttcattattaaaaagcattataactctgtagaaagagatactttgagactagtttctcttgacattttaaaccaagttatttataactcaaggttttctgtcccttcactcagcctgcttctttctttgtcctttctttctgtgttctctttagatcctgtttttcttcttggcttcagagcaccagcttacaagttgtacttttaaagatttataacagtaataatatgattctccaacataaaatttttgtatagttctggtttcaataatttgtagaaaagtgaaaatttgtaaaaacttggaaaattggagtatgacacacctcataaaaagagaatgtacatcagttctcaacagggtgggaattgttcttttactaaaaggtatcttatgttcttaactgacttgagcaagaacttttcataagcgtaccagttgtggagaaaacagaacatggatccagcaaagaaggacagggaaatatgagaattattagtatcaccatctgcctgtggttatggcactaagcccattttgttgttatgatactagctgtatatcgaatcttggggctccaagatctgtttcttaacctcatcctttgttattccttaaattgggcagttggtggaaaagcatagcatgtacttagcgttgttatattgtttagatataagtggaattgtgtggatataagcggaactttaactgttaaacttaggatttggtgtacatgagtcacaccttttagcttttcttcttactgtatttatgtggattttttttttttttttaaatagagagagggtctccctatgttgcccaggctggtcttgaactcctggactcaagggatcctcctacttcctgccagactgcttaggattacaggcatgagccactgtgcccagccacatgtgggttttctgataagaccaattttcactctgctcaaacacatattcttttactctacctttgttctcttcagatgatggtgagtcctgcttttctgagaaaattgaagtaaacctgtgcttcctaacttcattcctctttccctgggcagtctctactaatgctttctcctccttctcattttagaaaaatatatattattccacttatgttcttgatccctcccattgtgggctcaaagatcatgccccattaattatccctttctcatcttctaccttcctcctgtctgtcccactcaatctaccaagagttgaaaggttttttttttttttttaaagcaaacaaaaacctcttttattaagcccttcaagctgtccttctagtctttatatccaacacttggaaacagtaatatacgttcatttctctattacctcattcctaacctcttataatcctaatcctattgttgtgtcaggtactactaagtctccaatctcccatacagtgttctaggcatggcatggcagagttgggttatgcatgctgcctgaatcagagccagtgttaccagtttcccggaagggctggcctggagtcctctgcctgcctcatgctttgctgtactgctgtatgctctgatggtccctgcctgtcttttgtctcgctgactaccagcctatgtctttagcaatttagggaatatgaattcttaaaagtccctttctctgggccaagtggttctctaaaggcccctttcccactaatacctttgctttgtaagaattgaaagtgggacttagaaattagactacagggttaggtagtaagtacttttaaatgcttctttttcttgaaggtctgggtttttttggtcacacgataacatacttttcagtttctcctctccctctctaaccactgtttatttagttgcctttttttgggggggaggggacagggtctcactctgttgcccaggctggagtgcggtggtgcaatctcagctcactgcaacctctgcctccagggctcaaatgaccctcccagctcaacccctcgagtagctgggaccacaagagtgtaccaccacacccaactaatttttgtatgtatttttttggtagagatgggggtcttgccatgttgtccaggctggtcttgaacttctgggcttaagtgatctgcctcccagagtgctgagattacaggggtgagccactacgcccagccagttgccctttttctaccaacacctgtagatgtttcttgaagttttgtccttggctctctttttggtctctctcgtactgcagtggcaggatggatgacccccagatatattgctccagtctgttttctctccaagttctagttctgtatgttcagctgcctgtgggcatttatatccagaagccttgctggcatctcggacttgttatatatcaactaactggctatttcataaaatttatttttcttcctgtggttcctatatgttttaaaggtataacctgcttactgtcacacaggcatgggaatgccttgtgatcttgactcgtctctcaattactatccatattttttcagttgccaaacctattctctattatactcttgtagtccttttattcccactgtctggttaccctcactgtcatcctagactactgagttacctttaatttcatcacctactgtttctttgccctttgattcttctgccaaattcacattcattacagaaagttctgatcatggcctgttttgtccgcaaattatttagctcttttgtctagcactccgtctctccataatctgaccgcaacctggatttctagtttttttatactattatcattcacatagcatttgcttctggcatactaaatttttgtttcttctatttttttttttttttttgagacggggtcttgctatgttgctcaggctggtcttgaactcctgggctcaagcaatccacctgcctcagcctcccataagggctgggaatacagacatgagccactgggccttggccttaatacactttttcttacaactgttatatatttaaataaaaacaaatatgttaattaaatataaataactgtaaaaccaataaagtaaaattaatattatttaattcaaaatatagcactaaattgtggaggtggcacttaatcatataattatgtatttgtgtattgagtattttacatgttagagtcttgatttttttggggggggatcatgacaaaccaggttttgtgccattgtttttattgttgacaatgaactcttttttaaccactaatgttttaatttaatggactaatcaattcaataatgtaccttaaacattcattggctagttataggacttattgctagtgaattgttatagtacgagtatgccaagatggattcaaagccttacaacactcaataatgtaaatatgactgctgaggtggaggaggtaacttggaattctgcatagttaagctaccaaagctaccacatttaagtgataaataattttcctaccatttttttgtattcaaataactgtagaatcattgcatatttagcatgccatgatgccatttgactgtaacttgatctatatacatcatttaattttttcttcctgtgattttcttaatagttgagacaactccattgaactacaccatttataggttgttaaagtctctacttaaagaaattgaaatcttgttttatgaaatttctttcaattgtgaataacaatgtaaaatagttttgtttttataacacgtaaaataattaaattttaacattaggactcactactgacagttatatgctgaccacttcattagttaacggcaaagaattctttaaacttcattcagtgattttatttttagtaattttggtactgttattttgaatctatattagacatattgaaagagtaggcaaatatatcattatgttactgtgttattagaacaaagatttgtggtataagtgaaggtgaatataagagcaaagcagtagagttaaaattctgtaatgatagattagaattaaaagcatcaaaacaaactatttttttggagtgacttttttttcaattaaggtgttgtctttttaattttcaaaattttaatttttagggtacatagtaggtgtatatatttataggatacatgagatattttgatataggcatgcaatgtgtaataatcacctcagggtaaatagggtatccaatcatctcaactattcgtcaattttttgtgttaagaacattccaggctgggtgcagtggctcacacctgtaatcccagtgctttgggaggccgaggtaggcggatcaagaggtcaggagatcgagaccatcctggctaacatggtgaaaccctgtctctactaaaaatacaaaaaaaaaaaaaaaaaaaatagctgggcatggtggcggatgcctgtaatctcagctacttgggaagctgaggcaggagaatggcgtgaacctgggaggcggagcttgcagtgagccaagatcacgccactgcactccagcctgggtgacagagcaagactccatctcaaaaaaaaaaaaaaaagagcattccaattgtattccctcagttattctaaaatgtacaacaaattattgctaactgtagtcatcctgttgtgctatcaaatactagatcttattcattgtattaaactatatttttatactcatcccattagtggattaactatcccctttgccctgcttcctgccaccatcattctcctctctatctctgtgagttcaattgtttaaatttttaactcccacaaatgaatgagaacatgtgaagtttgtctttctgtgcctggcttatttcacttaacataatgtcctccagttctatccatgttgtttcaaatgacaggatctcattcttttttatagctgaatattattccattgagtatatgtccctccctcctccctccctccctccctctgtccctccgtccctccctcccttccttccttccttccttccttccttcctctctctctttctttctttctttctttcagcagggtcttgctctgtcacccaggctggagtgcagtggttcaatcatgtgccagcaattctggctaattttgattttttgtagagatgaggtcttgctatgttattcaggctggtcttgaacttctctgctcaagcaatcctcctgtctcagcctcccaaagtgctgggattacagatgtgagctaccgtgcctggcccagatgaccagatgattcttattgtaccttaatgtccttttctttcagactgaagaactccctttagcatttcttgtaggacaggtctgggttgatgaaatccctcagcttttgtttgtctgggaatgtctttatttctccttcatgtttgaaggatattttcactggatataatatttcaggataaaaggtttttttctttcagaccttcaaatatgtcttactgctctttcctggcctgtgatgtttccactgagaaatctgttgccagatgtgttggggctcctttatatgttattcttttcttttctcttgctgcttttaggatctttctttatccttgacctttcattgtttgagtattagatgtcctgaggtagttttttgggggtaaaatctgcttagtgttctataaccttctcatacttgaatattgatatctttctctacatttgggaagttctctgctatctctttgaataaactctctaccccgatctctctctctacctcctttttaaggccaatgactcttagatttgccattttgaggctattttctagatcctgtaggcatgctacattatttttattcttttttcttttgactgctctgtgtatttcagatagtctgtcttcaagctcactaattctttctgctgcttgatcaattctgcttttgagaaactctgatgcatttttcagtttgtcaattaaatttttcagctccagaatttctgcttgattcttaattatttcagtctctttgttatattatctgataagattctgaattccttctatgtattatcctggatttctttgagcttcctcaaaacagctattttgaattctcttaaaggtcgcatatctctgtcattccagaattggtcactggttccttatttagttggtttggtgaggtcataatttcctggatggtcttgatgcttctggatgtttgtcattgtctgggcattgaagagttaggtatttattctaatcttcacactccgagcttatttgtacttgtcttttttttttttttccagacctctcaaggatgaatgtatctgtcctttttgagaaggctttccagatattcaaagggaattgagtgttgtgatctaagtctttggtcactgcagccaaatttgcattaggcgatattcaaagcccagtaatgttgtgacttgcagacttgaggagatactgccttggtggtcttgggtaagatccaggagaattccctggattaccagacagtctcgtgttctcttcccttactgagtctttctctgtctctccttgctgagctgcctacagttcggggagggatggtgcaagccctcttgtgaccaccactgctaggactatactgcgtcaatgctgggtcacacgtgaagccagcacagtactgggttatgcccaaggcctgtaacaactatttcttggctactgctgatgtttattcaaggtccaaagactaaatatagtatatatagtatacattaggttcttttaagtttccccatagttcagggattctctgttcatttttatttttttaaactttttttctctcaatgctttattttgataagttctgtcactgtgtctccaggtttactaatcatttcttctgcggtgtgcagtctgctattcatctcatttggtgtaattttcattccagagtttatagggtttttttgttgttgttgctgttgtttaaagatcttagttggccttatttgtgattctagagttaggcaacacttcattccatgaaacagaataaatgttttctcagaaattgtaattttaattcttagaaatctgatgtagatcttttttatatctgccatgtctctccttaacattcttatctttctaataccttcttgaacctatggaagatatttttaatagttttaatgtctttgtatactaattctattatttgtgtcatttctgagtctttttctaatgatcgattttctccttatgcattatgttttcctgcttctttgcatgcctggtgatttttgactggatgtcagatattgtgaattttacgttattgtgtgctagattttaaaaaatttatataaatattttaaaattttactctgggttgcagttatttggaagtaattcgatcctttcggggcttacttttaatctctattaagagggaccagaacaacctttaatctaaaactaatttggttccgctactgaggcaatatccttctgaatactcaacccagtttcctgtatattatgagatttctgcactcttgctgttggaaaatggaatggtatttaataggaattaaatatacaaacaatcataaataatcttagtaattatatgttttaaagtccttgacttgactttgtgcctttgaatccactatagattgatatacagtctcccagttttaaattaaccttgcagttatcctaagaaccacttttataaattctgaatttctttaattatactacaactctcggagtataacctaaggtactagacacttcataccctcagtgatttagaattatttccatttaacatctctttaaaaaggagaaataaaactctaaaaattataaaactactaattgaaagaaaaattggcagactaatctctagtcgtctttgatacctatttaataggtgctaagaaataaccaaataactgtataatatagttaaattttaattctactttaaataaacgagatcaaaacacctatattttaaggccgacttttactgacttatttttcttaagggatataaacaactgtttatagatgtttacctttcaccttacttaagcttatattcttagagagattttaattctgcagagaataagaatgtgttacttaataataggtctaataactacttctgttccttctgtacttggaagatccgtcagtagaagggcccaagacttttgactggggacatagtgggagatggagaacctaaaagtgttctgggctaaggaactggaacagaactccaaagcaggatctgactagcattcatacagagccagcacgtattccaagctgcatacattgcctcctaattccaaagaatcctacaaatgccatctaaacctgccaaccacgagcccactcagctttctacctaattcctcatccccaaaccttacagagagtttcgtaattttaagatactttactctataattgtatgtgtataatcactttaataattttttgtagcctttagactttgtaattcttataagaggtgttatgcattctgaccggtaatgtttagggggaaaaaaaaccttctttccaacagcaataattacatttggtttgcacatacatgattaaactgctcttttgtttttggtgtcaatatttttctatgttctttataattttcccttttataactgcaaattttggtccaagtttcaaaatataccgtattaagaaatacatttttttcataaaattgcacagtttaaattataagtactctaaaaccttccttgctttttaaatgttaagattaagtttctaatacaagtacttgtgtgtttacttgctccactttcttatggttgggaatagcatcttccttcaggagctagcatattagcaggtgaatctgttattattactatcaacatgacttttttaaaaataacctttatttacatttttaaacaaggtggtccagccagtttaatcagttgacaaaaccccatgcatgaacaagtataagacttaagacagaaaaaagtgatgagaaaaaattttgtttatctctagacttttttcttttttggcccaagaatttattttgcctcagctttacacgcattcttgtgacgttacaggactgaggagggaggaagtaaaagggagctgtgactgtggtacgtatctgaaagcaagtgttagagagggagtggagaacgcataagcaagctggtttgaccagaaacagaactgcctgtgacagattaagagacaagcaaggcttggaatctgagagcaagcaaagagagtggaaatttacagctgccctatgtgagtgttcaagtgatcattttctggtaacgttttccagtggtaactgttactcttcaaaaagagggacagaaagtcaagacctaattgtggaaactcttttctctgccacgcttggtaataggaggcaacctctattaaatggacgataaaggctacttcatctaaagtgctttgagctcaagaaagagctgtcttcagcacctcaccatgtgtctacattttgttgcttagaaaagcctaggcatttctgtaacatttggtgagtatcaacaaggttatctatactggtttatagaaatggaaggaatatggtaaactttagttttaattgaggttctgcagttattacttatatatgcattataaaccatgctgttaccttgtttctttgtgcataatgaattgctgttactaggagaggtttaaaaaaactacaaaacaatacttctctgttgcctaaggcacttgaaccattaccaactattctgtgttcatggaatatcttattttggaaatgggtttttatttacaaagagtttccaaaaataaaatagtggcagtacagtataccttttttcatgtttctctttcaactgcatgaaaattagaaagttatctctttctgtctattgttagtaaattttgaattatcactgttttgtattataaattacagcattctctcataatttaaataaaaatgttgatactgttacttcaaaggatatataatttaaatgttgactgcttcttttagacccaataagtgacacctgatttttcctactttatgtaaaatgaatgaatgcatttgggtttctaagtaaggaataaagcagttattttgttcttacagtttataccaagctttcctctcgtataatcttattctgttgaagagctaatataaccatgtgtgtgtgtgtgtgtgtgtgtgtgtgtgtgtgtttgtgtttgtataagcaatagagcaaagaaaaataaactcttaaaaatatctattcacattccaataaaactttttttgtataatcttaaaataggagagtgtatgccaattatatatatctttttaaaggcatggagggaggcatgtaatcattgttctgtaggaggaagaaagtgtatgttgttaactgtgaaattgagtcactgcatgaggatacaccactctaagcagagtttctaatctaccctctgctagcctcaaaaaatatatatgtctttagttattgattcaagtgaatcctttaaggcaaaacaactgaaatgaaaacttctgcagagtatcagtaaacacattagaagggcttgtaccctagatagaccataaaatggctgtaatttctctaacatttcctctacgtgtacagaagcctgtaaaacaggttttgttttgtgggattttgcaggttttaattttttttttagactgttgacctatgtataagaagcagctcaactggtctgtgggaaccttttctgggctagttagtatcttgcacttaaaagtaaacatcatagagataatatcacaaacttacttttacttctttatagattttcccatgctcagtccttcttagactggtggaaaattatttgcatacagcttcacactcttcagaataattttttattttaaactaatcattcactgtgttaccttagtgatggtaccatttcccaggcccataggaatgtaaatatagaaataaagaataatgcattcccaatttacaaacactttgtatttgagaagtttacttgtgaatgggttgttggaaatttagaacccattttccctgggaaacagtttatcaagtgactgttgggcgtttattatagtctaagcatgtattttacccatgctgtagaaaaaccattgctaccttgaaaaatataagaaagtcaattccaatgacgaaactaaatataaaataattatgttggataagatattatttttattctaaatatgaatgcttaaagaaaagcaagtttaataggtggataggtatttggaaggatgcttatgggttttctgggtgctttcatgagctttcaaggttgattgcactgtttttgagatctaatctgacattgaaatcagtgatttctctttttcttgctacaagaatatttctggccattgagtttgtacttagccattcctaagggtctagcccagtgtgtggcacatagtaggtacctgataatagttattgcatgaggactaaactgtttctttggttcacaaaaattgaaatgggttattttccaagatatccaataaaggaaagaggcttaggggcacacgtttttccttatgagaaagagatggcctgaaaagaattgactgaattgtgagatgtgaacaaagcaaaagtaagatagaataggtctaactctgaagagaacaagaaaagaccatggtataacttggttgctgccttgaatgagtaggaatggtgctgaggggaggcaatttacaaggttaggtatcttgagtacatgggacattctaaagtcaggtgtcaactttaactcagaaggattatgtatttgcaaatgtttactaggacccatatgaagaaatgtgacttatttggaaaacttgtcttgggtctatccaagttaactttactggtcctgaaagtctctgtgaattgccagtatatgaaatttaaaagtcagtaatgcaatatgcatatgtaatgaaataataatgaaataaacaatacagtagatgcaggttttggttatcttggatgatttgtaatggcgtaaaaactcttgcatttgatcaagaaatactttctttagtctattgtaaatcttatgtaaaaagtaatgattttgagtggtcctaaatggtatataataggttcttaacaagtatttactgaatggatacaggtagatttggacaattttccatttctgggatatatatatgactgtgtttacatgcacatatatattcgtaatgtggcttaaagattatatttagctgatagtcacataacaaagaaaaatctattaaaactatattagcatgtctattaattatagtcaaagttggtatttcactaattaattagtttaaacagagatctttactgcttataagtgagataacatactttgcagttttgtgacttaaatgtctcaaacttctagcagaaactcatatagtcccttccaactttggaaggatgaaagattatatcaaattactcagccagaaaaaccgaatcaactttgaacagcttggggataacagataactttagcaaaatcactttcatctctattctctcatgttaatgtttttatagattgacaggtcatagacaggcacagggcttactgaagctatgaaatagttgtatttcacactatttgtataaaccatgtcttaatatcaataacagtaactaaccaaaatttgttatgtgtaatatgtatgtgcttacaagaaagaatgaaaactgaattatgagtctcccttgataattctgttttttaaagagtaaccatttgttaatttcagtaagatctaatgctttaatgatagttaccagtttttgagaatactgactttggttcagatcgctgctataagttgagattgtaaaattctaatataaaattttcaatcattgacaattattaatagctaataaaggtggaaaattttagctctgacaaatgactggagctgtcaacagaaacatcagtgtgaacgtaatgaataaagttactagtttttttttctggaactacaatagcctagtaggatccttagataataaatgtagtagtagttgtatatattcctaactttatatgttaattatttttaaaaatgtatttcagtgttactgtacattagaaataaagagtaattaacaagggacatgagtttctcttataaaagagtttttcttctgatgtaagtctgactgaggcttccagatgaatgggactcataaaaagctcctcacaacttttccatttctgtgtaaattgcccatttttagaaagtgcctctccctcaaatttggttaataaaacttataaaaacaagttattcttagtcatttttaactgaaaaagggattgtcagtgaaagttgttatttatactttattgtttcactcatatctataggttttcaagtacaaaattcagttgtggtgctttgtaattacatttaggatgcatattttaaaatggaaaaattgaagcatagaagatactgattggaagattctttgacatatataatatggttcataatgatatggtattattacatatataatgatatgctttgtaacttaaccatctctgtgaaggcaattctaaattatgttttttgggggagagtcttcttggatacagtagcaaatacagtagaactttaaggtgcacttttttgttttaagattttcatataatcaaatgcacccattttaggagaatggttcaattagtattgacatatgtatgtactcatgtaacctccatcccatttaattttaaaaaatgaatcttacaggcacaattttttgccatgtacacttgatttcatttctttctatctgtgaatcctatttggaatacaggtaaaggaatagcatccctgaccttttctgaattttttttttgtttttttgagatggaatctcgctatatcacccaggctggagtgcagtggtgcgatcttggctcactgcaacctccgccttctgggttcaagtgattctcctgcctcaccctcctgagtagctgggattacaggcgcctgccaccacacccggctaatttttgtattttagtagagacgaggtttcaccatgttggctaggctggtctcaatctcctgacctcatgtgatccacccaccttagccccgcaaagtgctgggattccaggtgtgagccaccgcgcctggccctgaaatttttttttatgtggtggtaggtttattttaatttttttagtttaacagaaggtgcctgtgccttaagttaaattaacaagctcttaagaaatcattttggaaatgttcctgtctaactcattgttgattgtaaaataaacttatgtgaggaaaagaaggttcattttttagttgtctttcttaaaatgagttagcagtttggttatacctctggaaatgttgagacatctcttttggcttcagatataaatttcccactcccttcagttttcctgggaaaactttgacattcaaaatgttatttttttaagtttttttttttgagacagagtctcactgtgttgcccaggctggagtgcagtggcacaaacatggctcactgcagccttgacctcccaaagtgttaggattacaggtgtgagctaccgcacctggcctcaaattattattgaatagcatagttagagattagatattagacatttttccctttgaaatattttaagtgggataacaacaagggcatttaatgctccaagtggctattcccctcttcccctaggtcctctcctacccccctgccccctgccaactctcctttccatttatgtcactgaacatattcagatgactcaattgggtggttgattttgggccatcttcaatggtgctcacacacaagttaggaatatgaaatattttactgtgtattaggaaagagaatgctgccaaaatctactacaaaatctacagggtgtgagttccctgggagcagagttggatgatcttttttggctttctctccagaatctgagccaagtactactctttatgaaactttatagccaaagaaatcatgtttgaataatgctttgaaaagacatgacaggccaggcgtggtggctcatgcctgtaatcccagcactttgagaggctgaggcaggcagatcacaaggtcaggagttccagaccagcctggccaacatggtaaaaccctgtctctactaaaatacaaaaatagccgaacgtggtggtgagtgcctgtaatcccagctactcgggaggctgaggcaggagaatcgcttgaacccggggggcggaggttgcagtgagccgagatcatgccattgcactccagcctaggcaatagagtgagactccgtctcagaaaaaaaaaaaaaagaaagaaaagacatgacaatcagatattccacagtttgaacttaaaaaaaaaaggttatttgtttattcattcaaaataccatttaagagagacatttctactataaaagcatttgcatgatctattatacaagcttcggaaaaaacagaacatttgaagaaagaaggaaattaagcatccacaagcaaactacattactcagaggcaatcaccgttaacatttcaaaattattttttctatacataggttttgtgtgtttgtgtttttgtttgctttacatagttgtagttatgctctgtaatttgggatgttgtttttaacattaacatttccattctatttcacattctttggaaatattttcctagacatatttcatcaaatttaataagtcgctggttttaagacatatggttactttatgtacaaccgagaaagaaaagaatctgcctgttagtgtaaggcaccaacaattgtaagacacacctaagctttgaaaatgttaaaatgtaaaataattgtaaaaagtttaaaagtttaaaaaatctgtgacatatgctaatgttccatcaactgggtatatcacaatttaattatttccctctgttagattagatatttctcagttttttatgataaaaaattgcagtaaacatttttgcatgtaaagataatcctttattttagtttattttcctaggacagattaccagaaatggaattactataaagccagaggttgtgaacattttaaggttctagattcatatttgtcaaattattgtctaatttatatctgcaccagtaagaaatgagagcctgttgcaaaataccatcaatagaattgagtttgtcaaaacaacaaaaaacttagtaacataatggacaaaatagtctttcactttgagtttgcatttttttttattatagagaatggttaaacatttactaatatgttcattaactgtaattcctcatttatggttttcacttatctgtatgtttccttaatgattttcttaattgtcttaaagagatcttttgtaatgatattagccctccatctttcagattcatatcacagaattctctagtttgttgtttgcctataattttttttattatttatctatagaaattcaaatttttgtgtttgtggcatattcgtattaactttgatttgttggtctttttctttgaaatttattttatcacttataaaattacagaaactatttcacatccagaaatttgaaagtcacttatattaacatctatatctgagctgtgttgttcattgatgtgtttgtttcttgtgctattactgtgttacagtactttataacacttttcatttcatttcctcctaattttcctttttaaaatttgttattcttgcttatttagtattcttgactaaatttagataccaaaaaaatttttttggacatttgattggaactgtatcaaactgtggactttaagaataactgacatttaaataatatttattctgtctattcaagaacaaaatagagtgttttttttaacctcaaatctttcctatcttaattatgtaggttttctccacagtctctttattatttcagaaaaaagaaatgtgctcattataaataatgcagaaaaatacctacatgaagaaagttaaaccatcacaaatctcataatttagataatgtcattaagattagctaagccacattctagaatcattctgtgactataagattaaaaggatggctagctgaagggatgaatagataaatagacacatacatctataagtacatcttctatttctctgttttatttgttagttttctatttcaggaagagtaattatcctattttcgaaattaaggttttgtagttttttaaaatacagatctggtatagattttgtacatatttagttggcagtatgatcaaaatatgcttttcattatgttttctgactggcaatttcttatatgtgaaagctgtatgtatatttatcatgtatttgactacttaacctaatttctactaatttcagttgttcatatttttaggtatataatcatattgtctgttaattacaattttgtcacatccttcccaaattttgtagcatttatttatgttttatattttagtgcattgatcacaacatatggtaatgatagcgtgattgtgatgacctttgttttatacctccttttagtaagtatgcctccattaaccatttttttgtaaattgagctaagatttgtatctctcttggttttaattttattagataactttttcagatgccactgagataatttttatttgacttattgatataatttattatattcatcaattttctattattaaaaacctgatttggtattttgttttgtaaacacagcttttgatttttattggccagaattttacttagggtctgtattgaacatatttaaactgaaaataatgtagatcactttcccagtagctcctgttctcatttctgtcagtagctatcttttatctctttccctaccagactcctctgttttttgttttgttttgtttttgttttttttgagacagagtcttgctctgtcgcccaggctggaagtacagtggtacaatctcggctcactgcaacctctgcctcccggattccagtgattctcctgcctcagcctcctgagtagctgggattgctggcatgcaccaccatgcccagctaatttttttttgtatttttagtagagatggggtttcaccatgttggccaggctggtctcaaactcctgaccttgtgatctgcccacctcggcctcccagagtgctgggattacaggcgtgaaccaccgcctgttcctctgtttcctttcaagcaatgacttccttgttctacctagagcatattaaggtcaccaaattaaaactatttaatatagcctttattgtacctaatatacatatgaaatagtattaaatttgcaagggtaattggctttatatgtatgattatgtctattacatacactgtatatgtagtataataacctctatatattctcttcatgacaactaaatacatatattaaatgctttgtgtgtgtgtgtgtataatttctcatgaactctgcatttcttatattcatgttgtaatattgcttgatatatatttatgcatccttttattctgaacatttttgtgtcgttttgtttctattatggctcttgcagaatttagagcagaaatgtgtgtgtgtgtgtgtgtgtgtgaacccaatttgagagtttgagagtcttggttttttagtagtagaatttaacacatttgtatgtattgtaattattggttgctcttattccttctatattgttttatattctctgtttactatttgtttatactttccttttcattcctgatttttgctgatttggtcaaattatttttgttcctgttttcccccttctggtggttgcatcctacttccattattctaatattcatcattaaatgtttaataaacaattcaagaaacaggtttatcttaatttgtgtatgatgtgattatagaaaacccagagacttaaattagtttggcatgacaaacccatataaattttattatgatttaatcattatttctatccttttccttgaacaaagtctataaaagaattttagttgtatttttccagatggttggattttttaaaaaacattttgcctctatcaaaatacttcaggaatacatttttagcagtcatattaagcatcacagacacattatcaacctttacttagatttagccatgtattttattggtttctttgctcaactgcttacttttcaactgttttctcatttttctgtttctcctccatcttcctttctcttccccctactccttcaccatctttgtccttaggtaattttagtttgccctcacatctgcataattggtaaagtatagaattctaggtgaaaaatctttttccctagaaactatgtaaacagtgtttcactgccttctgtcatttggtgtgaagttactaatcctgattccactctgacagtctggttcttaggtgccactctagatttttcccctttatggaagtttgtgggatttcgctttagagttcagaaatttcacagtgtatcttggaataggcctttttgcattccctctgtgtaataaccattagtttacttaaatctgaagacatgttcagctctaggaattttgcttcctttttatttgttgatgtatttgttactctctcatcagttatctgtttttttcttttcctttaagcatttatattcaatcaatattggctctccagctctaccctgtatatttccaacttttctgtgaattagttctttgcttttctttgtattttactcttcattccagatttccatggcttggtctttaaattgtggatttgtttttcaattctatacccttctaccaatcagctattctattgcattgcatgttcttagttccaagaatgttttctcattcattgtttacttctttttcatagcagcctgttcttattttatggatgtgatagcatagtatatcttttggttatataaatataatataatttttaccatcccccccagggtttgctctatttatttttacatttctcttttatattcttgattttcatcaaacacctcatgattcttgcacgtgatttatatttattagcgagggactgtactagttggtattggcagctgatatgactttcttcagccaccttaaagaactgggcaaagtagctgggcacagtggctcacgcctattatcccaggactttgtaaggctgaggtgggaggatcacttaaggtcaggagttcgaggctgcagtaagctgtgactgccactgcactccagcctaggtgacagagcaagaacttgtctctaaaattttttttaaatatgaaatgggcaaagtatagaattaggaaatgtacagaataagaaagttaaaaagctagtatgggtcaggtgtggtggctcacacctgtaaccccaacactttgggaggccaaggtgagaggatcatttaaactcaggagtttgagaccagcctgggcaacatacagagaccatgtctctacataaaattaaaattagccaggagttcgaggccagcctgggtaacatggcaaaccccgtctctactaaaaatacaaaaattaaccggacatggtggcacatgcctgtggtcccagctacttgggaggctgaggtgggaagattgcttgaacccaacaggtcaagactgcagcaagcggttattacacaactgcactccaaccataatgggacaaccttttacagctgtcatactggcgaaatttttaaattctgacaggtccaaatgttaggaaggatgggtgataactgcaactcacactacacagctgtgaaagtataaactggaataaaaacttgagaaagcaatttggctatatcgaatgaagatatagccattttctcttttgtctctgctttgaatctattttaaagcagtgttttgttttttgagacagagtcttgttttgtcacccaggctggagtgcagtggcacatcttggctcactgaaacctctgccccctgggttcaagcgattctcatgcctcagcctcttgagtagctgggagtataggtgcctgccaccacacccagctaatttttgtattttttgtggagacggggtttccccatgttggccatgctggtctcgaactcctggactcaagtgatccacccatcttggcctcccaaagtgttgggattacaggactgagccaccgcacccagcctgtactacattttttatctatttatcttttgatggacacttaggttggttccatgtcttggctattgtaaataaggttgcaatgaatacggaagtgcagatatttccttgacatactgatttcagttcctttggatatatacccagaagtgggattactggatcatgtggtagttccatttttatttttggcatatcatccacaccgtttcttatagtggctgttctaattcaccttcccaccaacaatgtacaagagttcccttttctcagcattctcatcaacacttttctttcttcttttttattttgattggctatgtcacaatctatttactagctagttgctgcatccaggacagggaatactgtggccaaacctgggtcatgttcccccgcttttgttggggtgaggtgatgtgggaagtagggcagacacatctatcaccagaagaaacccggaccaaatagctaccagaggttttcttccttttcttttacttctctgattgagttatttctacttctatcattatttccatccatcttttcttggagatttttggggcagtttcctttttaacttctttagttgaatccttatttatttttattcctatatgaatgagttataattgtagattctcaccctcccacatgttctgccaacaatatacaggctccttttcaagaactatttctgattttttagcattaattttgttgagctctttgtgggcctcattccatctcatctttttgttccatttttagtaaatatacactatctgttcacacataaatggtatattggctaaggatttaattatggtgttatagactttacttatcagaactctaggttttctccatggccttggggcatttggttcatggaagtctaaaaccaacctgatttttatgctttcgtttgtttttttaaggtcattttgttggaatgtgatctgagaaggaaatgtttattttaaaagctgcaagacactgaatgttgggtcttatcatgaatctcaactagaaaaatcgttcgaatgatcaagtttagattgtttttctgtttacgctgttatatctttgattctgttccagttttaatgcctttgctgtttttggcttcctatcctcccccctccattgttgtaacacctgtttgttaggggataacactccattttcttcatatcgctataaaatacctatatagatataaagatatgtatccatacacactctatatcttttcttcatcattttagttttttcgaccttttctcgccttctgggaaaattttgcacgtgtctgtgtctctcactacatcgtgagccctttgaggcttctttgtttcgtatttccttgttcagtgcctagtacattataagtgctcagtaaatacttttcgaatgaatacatgcacactaactaattttgtaccttgaagttgccccagacccattttctgtattgttattctgctctatgcagtttgggattcccagtctgcatcttgggcatgtgtgtatttatatgtgcatatatgtgtgtattttcagtcttttaccttggctagctcttttttttgtctaaaagagctttttgtctccttttcttcttttcttaaatttatatctgttctagctttatagagaattaatttcagaagcaacctttcttgcccaagtctgcagggcatttatttcctttcattgtgttcctttaataataataaacaacctatttgttgtttattctgcttactgactgctggaagaggaaaagtataacagggccattgtcagtccactaacatttctgtgctgcatggcctgctgtcagcattaatgctgagggcacgttgatgtgcgtggtctcaacaccgttttcaatgcctaggaggcatttatctagtgtcagccttctggactaacatgcgtcttttcctgtccccactgcctgctttgctgaaacagaatgtatgttcttaaaactctgaggtagactttatggaaaaattactttcctgccaccttatccccacaaggcaccattgtcaggcctctccattccttttgttcccagcttaagcactttatttttggctttatctttatcatgataggatactgggggttaaagactcagaatgggtgtgggacagtggtgaataacctagagccctgatgctcaatcttactttaagaacaacttcgttttacagatagaacaagtgacacctagaagggggtgattaacttcttttgaatcatacagcagatcagttacaatcaactagagggagtttacgtgtcttgtgtttgtgtagaaggtttgagtgctacttgcttcattgcttaaatgaccaccagtgggctaaatgatgtgattggagtagatgtatatatagtgaccagcatggtcgcccagagtgtgagaaaggcagcctcaagtttccaggtgatggaggaggtgtttagtcttggagtgggggaggtgtttagtctgggagtgggggaggtgtttagtctgggagtgggggaggtgtttagtctgggaatggagtggggctggccatggtctgagaagaactgggagaggcaggagagttctgccttaatttgcagggggtctgggtgctggaactcaagcatagtttaagagcatgaactttgatttccttcaaaatatggatcccaaaatagaagaataatgataagatgaaattttaaaacattgttaaactaatcatattatacttattacaataagtaggtatagtaaaatatgaaagtaatttttaaaggagattgtattgaggcagtatactgtgtgttatttccccattatataaccccattgccctaaaatgtttgctttttccacttaataataggcttcaaagaacagggattgtgtttttcttgtttgtggctctatccctagtatttagcaaagtgcctgtgctcagtaattactcagattatttattcaatgaataaatgaacaaacccaccatcagatgaaaaggggagatagtgaatcagaaaatgcttatcaccagattgacatggaaaccctgaaaacgtttttaatttaagtaaattagcattagcttgttacagtgagaaccaagcaaagtaataatggacaaaaaatcatatcatatctatgataccatgttataatttgtactctgttttgatgtcagggagtatttaaaattcctacagttatatatctttcccttagtgctatagaactacagggagaaagacagcaattacaggcataccgtattttattgtgtttcacctttgttgtgctttgaagacaccgtgtttttgaaaaattgaaggtttatggcaaccctgcattgaggaagtctattggtgccatttttttcaccagcatgtgctcactttgtatctcttgatacattttgttaattctcacaatatttcaaactttttcattgttagtacatatgttgtggtgatctgtgatcagtgatctctgatgttaactattgtaattgttttgggacaccacagactgtgcccataatcgataaatgttgcatgtgttctgagtgccccatcgactggccgttcccctgtctcactttcctcaggcctccctgttccctaagatacaacaatactgaaattaggctggctcataaccctataagtggcctctacgtgttcaaggaaaaggaagagtcacatatctctcactttaaatcaaaagatggaaaaatgattagtcttagtgaggaaggcatatccagagcggaggtaggctgaaagctaggccttttgcatcagtaagttagccaagctgtggatgcaaaggaaaagttcttgaagaaaatgaaaagtgctactccagtgaaaacacaaataataagaaaacaaaacagctaattgttaatacgaagacagtttcagtggtctggatagaagatcaaaccagacacacattccctttagcctagtccagagcaagtccccagctttcttcagttctgtgaaggctgagagaggtaaggaagatgcagaagaaaagtctgaagctaaaagagattgctccatgaggtttaaagaaagaagccatctccagaacataaaagtgcaggggaaaaagcagcaagtgctatttatagaagctgcagcaagttatccagaagatctagctgagatcattggtgagggtggccacacaaaacaacagattttcagtgtagatggaacaccctcgtattggaagaagatgccatctaggattttcatagctagaaaggaggagtcagtgcctggctttaaaggacaagctgactctctagttaggagctaatgcagctggtaacttgaagtaggagctaatattcatttcccattccaaaaaccctaggctcttaagaattatgctaaatctatttggcctgtgctccataaatggaacaacaaagcctgatgacagcatggtttactgaatattttaagccttctgttgagacccactgctcagaataaaatattcctttgaaaatattactgctcattgacaatgtacctcatcatccaggagctctgatggaggtttacaaggaggttaatgttgttttcatgcctgttaacatccattctgcagcccatggataaaggagtaattttgactttccagacttgttaaagaaatacatttcatatgttcatattgttctaataaaagttaaaaaaacaaacaaaagaaatacatttcataagatgcaagcagccatagatagtgattcctctaatggatctgggcaaacttaatagaaaaacctgctgtaaaagattcatcattctagatgccattaagaacatttgtgattcatgggaggaggtcaaaatatcaacattttcaggagttcagaagaagttggttctaactctcatgggtaactttgaggggttcaagacttcagtggaggaagtaactgccaatatggtggaaataacaagggaacaagaattaagaatagagcctgaagatgtgactgaattgctgcaatctcacgataaaacttgaacaggtgaggaatgttgcttctatggatgagcaaagaaagtggtttcttaagatggaatctactcctgctgaagatgaaatgacaacaaaggatttagaatattacataaatttagctgataaagcagtggcaggttttgagaggactgacttcaattttgaaagcagttctactgtgagtaaaatgctaacaaactgcatcacatgctatagagaaatcttccatgaaaggaagagtcaacgtagcaaactttattgtcttcttttaagaaatcgccacagctactccatccttcagcagccaacaacctgatcagtcagcagccatcaacattaatgcaagactctccaaccagcaaaaagattaggactcactgaagggtcaggcaataaatatttttataaatcaagttatacatattgttttcattttgtttttgcttttgtttttgttttattatactttaagttttagggtacatgtgcacaatgtgcaagttagttacatatgtatacatgtgccatgttggtgtgctgcacccatcagtttagatataatactattgcacacttaatagactgcagtatagcgtaaatataacttttatatgtactaggaaaaaccaaatacattttatgactcactttattgggaaatttgctttattgcaatggtctggaactgaacctacagtatctcctaggtatgtctatacatgaatgcatttggcttctttttaaaattctactttaatgcaaaatatttgatcattgattattatgcattcagagaataagtttatgttttttaaaataatggaaaaaggtataattgactcaaagagccagaaatgtctaggacatttaagatagaatcatatctaaactactgtgcctttctcttttgtgaaatagttcattaactatgtcatggaacttcttgtaataatagcagctaagcattatagaatacatatagctaaacattatagaatatatttattattattatcactttctttggtcaaaatatctagttttacatatcaacttggactctaaaattatttcttgtataatccttatgtttctattgcaggaaagattttaaactttgtataaaaactttcaagcaaaactttaaaaatatctttttaaaaatatatgtatttaaatttggcataaaacttgaaactcattttaatttgatcacttttaatgtttcagattactgaattcatgttattgaaaacttataagacattggtataaaaatttaagcatattaagagttaaagttataatttttgttggcttatttgtttttagcattccatattggaagaagagatttctacacatgaaaaaaatgcctttgtttagtaaatcacacaaaaatccagcagaaattgtgaaaatcctgaaagacaatttggccattttggaaaagcaagacaaaaagacagacaaggtaagagctaaaacagtaacattatgattaaagtacatgcatcgcaatgccaaaaaccaatgtaaaagcttaatgaagaattcaaaatatggtctgtgatgtgcacatagaccctctataaatagatttaagttgatttcaggttttatgcaactgattattatttagtctgttgtgatgaactttaggttcactctctagagactctgaccacaccggatccctctagactacacagcttaaagatctaaaaggttatactggtgtgtaatgttacatttacatgaaaggtaaaaagtttttatttaaagattgactgatagtttctgttacagtgaatctcattttcatacggttttaaggtcttattaagtggggcttcctcataggaatgctagttattccttcaaagggatattgaatcctatatattcgatttctctctaaagtttatggcaagattcaagatatctataaaagaaatacacgagttcatagtatccttctattccagtaaatgatacaatattgaattctacaaggggtgtagaaatagcttattctaattctagtacactttgtaatattgagccaaatcttggcccaaatagaagaaaaatggcttttttgcaagtataaatctaaatggtagaagagagaaaaaagaaaaaaaaacctttttacacattttcattagtaactaggaaaaggccaactaaaaccacaataaattcagattacacaactactgtcttggcaaaaatgaaaaggtgtgatgatgttaagtgttgacaaggatggagagcaatgaggactttcattaactgtggatgatgacatatacattgatgtaactgctttgaaaaccagtttattatctgtgaaatacgaagatatgcatgtgcctgcagtgccactcctagttataaactctagaggtattcttgcacatctgcaccaggaaaaatgtacaagaatgttcatagcattgttgttaataaaaatcctttcatggaaacaacccaatgtccttgaacagtagaaccaataaaaaagttgtggtataggcattagtgtggaacattagaaagtgataaaaattaaagaacttctgcctacatgcaacagtatagatgcatttcttaaaaataatgttgaatgaaagaagcaagtcatgaaggggtaatgtactgatccataaagttgaaaatcagtggaactaagctatattgtttcagcctaagttttctcatctataaaataggaataataagaaatgtaaagacatgtttgtcacaagagatataaaaatatttacatctgagctgaaaggggccttcaggtgactcctgggtgctgaaaatgtcctgtttcttgactgggtgatggtcataaagatgtttcctttattattatccttaactctctcttaaacatactctccatgtatgtttaaagcactcttctgtggatatatctcacaatttaagatgcttccggtctttagtacattaaggattgcttcagtcaggctattaaggatatgaaaaattactttttaaaagtagtgtcagccaggcgcagtggctcacgcctgtaatcccagcacttcgcgaggctgaggtgggcagatcacctaaggtcaggagttcgagatcagcctggccaacatggtgaaaccccgcctctactaaaaatacaaaaattagccaggcacggtggtgggtgcctgtaatcccagctaccagggaggatgaggccggagaatcgcttgaacgcaggaggcagaggttgcagtgagctgagattgtgctgttgcactccagcctcggtgacaagagcaaaactccatcttaaaaataaacaaataaataaaagtagcgtcacccaagaagcagaactagagaaaaataaaaataaataaataacaaaagttgcatcatgctaccatgagttatttttatgtaatttgccttattctactcatttccttcttcatttataatgattacaatattatacttaaaagtaatgaaagtatatttctttaaaatattcagacaaattgttaactaaattaatctgctctcctttcctacctatattaattttaaagatttttaaattgagatattaaaaattaacataccatataattcactatttaaagtgtacaattcattggtttttagtacattcacaaagttttgcaactcaccgctatctaattctagaacattttcatcactcccaaaagaaaccctggagccattagtagtcattacttatttccctctcccccaggccctaatacctactaatctatgtactttctgcctctatggatttgcctagtattctttaaaatatagtgagttttttttaagtttcatagatagcaaaaaagacagtgattctgtgtgaggaataaatggattgacaaagaaagcttatgagttttgacaatttacaatcttatacttggaccattcgaaaatcagaggaatagggatttgttgaaaaaccttaacacaatgctttaaataaagatcagtagctactgataagtcttcaaaatggaatcaatttaattttcaagcataaagtttatattgaattgctagcaaaattagacaatgagtgtggtttaaaagattactgggccggatgcagtggctcacgcctgtaatcccagcactttgggaggctgaggtgggcgaatcacaagttcaggagatcgagaccatctggttaacgcagtgaaaccctgtctctactaaaagtataaaaattagccgggcgtggtggcgggtgcttgtagtccccgctacttgggaggctgaggcaggagaatgacatgaacctgggaggcggagcttgcagtgagccaagattgtgccactgcactccagcctgggcaacagagcaagactccatctaaaaaaaaaaaaaaaagattatttagtgtatgttgactaagtagaaataccaaagagctgttttatataaataaattttataatacttataatattttccaaaataaaaaaggcagtgcttactgtttttgtttttttgtttttttttttttttaaatttatttttttattgataattcttgggtgtttctcacagagggggatttggcagggtcatgggacaatagtggagggaaggtcagcagataaacaagtgaacaaaggtctctggttttcctaggcagaggaccctgcggccttccgcagtgtttgtgtccctgattacttgagattagggattggtgatgactcttaacgagcacgctgccttcaagcatctgtttaacaaagcacatcttgcaccgcccttaatccatttaaccctgagtggacacagcacatgtttcagagagcacagggttgggggtaaggtcacagatcaacaggatcccaaggcagaggaatttttcttagtgcagaacaaaatgaaaagtctcccatgtctacttctttctacacagacacggcaaccatccgatttctcaatcttttccccacctttcctgcctttctattccacaaagccgccattgtcatcctggcccgttctcaatgagctgttgggcacacctcccagacggggtggtggccgggcagaggggctcctcacttcccagtaggggcggccgggcagaggcgcccctcacctcccggacggggcggctggccgggcgggggggctgaccccccccacctccctctcggacggggcagctggccgggcggggggctgacacccccacctccctcccggacggggcggctggccgggcagaggggctcctcacttcccagtaggggcggccgggcagaggcgcccctcacctcccggacggggcggctggccgggcgggggggctgaccccccccacctccctcccggacggggcggctggccgggcagaggggctcctcacttcccagtaggggcggccgggcagaggcgcccctcacctcccggacggggcggctggccgggcgggggggctgaccccccccacctccctcccggacggggcggctggccgggcggggggccgacacccccacctccctcccggacggggcggctggctgggcagaggggctcctcacttcccagtaggggcggccaggcagaggcgcccctcacctcccggacggggcggctggccgggcggagggctgacccccccacctccctcccggacggggcggctggccgggtgggggggctgacccccccatctccctcccggacggggtggctggccgggctgaggggctcctcacttcccagtaggggtggccgggcagaggcacccctcacctcccgacggggcggctggccgggcggggggctgacccccccacctccctcccggacggcacggctggccaggtggggggctgacccccccacctccctcccggatggcacggctggccggtcgggggggctgaccccccacctccctcccagatggggcggctggccgggcggggggttgacccccccccacctccctccctgacggggtggctgccggtcggagatgctcctcacttcccagatggggtggctgccgggcggagaggctcctcacttctcagacggggcggctgccgggcggaggggctcctcacttctcagacggggtggttgccaggcagagggtctcctcacttctcagacggggcggccgggcagagacgctcctcacctcccagacggggtctcggccgggcagaggcactcctcacatcccagatggggcggcggggcagaagcgctccccacatctcagacgatgggcggccgggcagagacgctcctcacttcctagatgtgatggcggctgggaagaggcgctcctcacttcctagatgggatggcggccgggcggagacgctcctcactttccagactgggcagccaggcagaggggctcctcacatcccagacggggtggcggccgggcagaggctgcaatctcggcactttgggaggccaaggcaggcggctgggaggtgtaggttgtagtgagccgagatcacgccactgcactccagcctgggcaccattgagcactgagtgaacgagactccgtctgcaatcccggcacctcgggaggctgaggttggcgggatcactcgcggttaggggctggagacctgcccggccaacacagcgaaaccccgtctccaccaaaaccagtcaggcgtggcggcgcgtgcctgcaatggcaggcactgggcaggctgaggcaggagaatcaggcagggaggttgcagtgagccgagatggcagcagtacagtccagcttcggctccgcatgagagggagaccgtggggagagggagacagagggagagggagagggagagggagagccgaaaaagtttcttgtatagccccggctcttagagccaggctggcaacctttgatatgtaaatgcaagccattagaaactaggtccacccaaacatggtgattcccctcactgtttttgtttgtttgtaactgtgccattcattataaataaacagagcccaagaccaagaagtggttttttggattatttgtttgtttgtttatggcctaaacatttttattcttttaaccgttagcatacgttttggtcactaggcttcagaagaagtgtctaaatcactgcaagcaatgaaagaaattctgtgtggtacaaacgagaaagaacccccaacagaagcagtggctcagctagcacaagaactctacagcagtggcctgctagtgacactgatagctgacctgcagctgatagactttgaggtaagccagctgtaaaaggatgtcagtggtgcttttcaattttaatatctatctatctatctatctatctatctactattcaacttttgcttttcattatggctttccatgtgttattttttaaagttttttctaaaatgtctacaattaatctattttttacaaaagcaaaaagccaaactatagttaagttttatgcagctaggtagcaaagataacggttaatagaagtaataataagaagtaacatttgttgaatgcttgctatatgccaggtacagtttcaagcattcaactcgttgaattcttaaaactacctttgtgtttaatactgtattattagccccatgttatagatgaagaacctaaagttcaaagatattaagtaatttgcccaaagtcactcacttacttcagagcttcaaattcagacagttcttttaatgaacatattataccaatgatttaagaaatgtgttaagtgctagtaatatacttatctccttttgaaggcaattatacctaatttacctaaataataaactgactaactaaaacaaaagcttagaaatgtaagtggtgaatatgtctagtcattttattatctattgtgtaactcagaggtggtgatttttcagtgagaaatggatacatagacaagtttgggcattgactgttgaggcgacagaagtcctggtttggctttgttgctttgtttctatcataatacgaattttgttcgtatcaggtaggtacttgggtctccattcattctcagagatagaggagatatgcaaagtgaatagcttttagttttgttcactgaataagtggaaggaaaactaatgacagtgattactgtgattagaccaagatcaggtcagggctttggggatctgtggaagtagtagcctacagctctctgcacaagttagaccagggaagattttagcagccgaagcagaggaggaggagtgcagagccaggaggcgtgcagtccagttgtggctagaagcaagaccaagtggggaccccgaagggcccagacttcagctcatcctttcagttacagctgtctttttctttctttcccttccttattctatctctttctctgcctttggcattttctgacccataatctttttcttttttttttcaatttttttaaattatactttaagttctagggtacatgcgcacaacgtgcaggtttgttacatatgtatacatgtgccatgttggtgtgctgtacccattaactcgtcatttacattaggtatatctccttatgctatccctccccgctcccccgaccccacaacaggccccggtgtgtgattttccccttcctgtgtcccagtgttctcattgttcaattcccacctatgaatgagaacatgcagtgtttggttttttgtctttgcgacagtttgctcagaatctttttctttttcctcttgcttggcttgcttactctccctctccatcttaggtctccatcttagatttaaaatcagctatatgtgaaattaaagtatagtcttactgtatgtatatacttttctgtttcttttatttagtttaaaattaggtattatgaacacttgtagaagctgtggcatagtgaaaaacacacttgactcggaattagaattgtttagagtcccagctctgctctttcatggtcagtaacttaacctctttgagcttaagttttctcatctataaaataggaataatacgaacttactgcattgttttaaatattaaactaaataaaaatatatacatatatatgttgtgttatatagggacactaaatataaatgcaaactgtatacaaatgtcaagtagtagtattttttcatttcctctttttctcaaactcaggaactaaagttaagtgtaagctggtttgtttttgttataacccttgattttttttagatttagttggtcagtgaccataaataggaaaatgattccctattcttatagtagtatagttttataaattttctgttgttttgcttgtttctctgagaacagcagcatattaagctactgtcgtcattaattcataagtacgcttgagttagtttatgagattaacccaatttgcagtggagtgctagaaggaatatgactaaggatggttatgttttgaagaatgagtcagggatgagatgtcgtcaggttcagtgacctgtagaagctttgagcagccacagaacctcataggttcaaagtgctttccaagaattggggagttagggaggagtataccaaagaaaaactttgggtgccttataactttctttggcattggctcagataacaaaagtggaatgtaagaaacagttatgcaagttccccttcttttatgtggcacatcaaatataaattaaaaattttgagaagaagttcatttaaaaattattttggaattaagacatttaattgcctaaaatagacttgtacatttttatcaagtaaacttttattctctggaatccttggagaaaagaagtatctttctgaacatttgaattttccatatagctgaagattaagccttcaaatgcagagttaaattgattactcttgtggattactttaatttttaaaataaaatgtattatatacttgccttccctccagaataaaatactagatataatacgtttttaaactgatgattcaaaactattatgaagatttgttattgtgataataagataggcaattcttaactttatttattcaattgacgtgacacatacctagaacataattataagtgaatgtgatactccatagatgcagccgttatccttctctagcctgtagaaaaatatatacttcctggttgaatgaataaatgaatgaatgaaaaggagtgaaagtttagtacagttccattttaagcattccaactacatacagtattttcaggaaggaggcagccagcattcctagcattattagcctacttatagaaatgtactatgttatctctatgaactggaggcatggatgatcagcctgcaggcagcaactctccttctcaagcctaaagtatctatgtaagctactgacagcttgataaaattccttctgacttcagacttactccagcgacacagaacccccacccccatgtctcttggttcatggcttgcactgggacagccacttctgtgttaccttgagtacgaggactgtgtttgccacacctagtggcatgttaatttgtgaattgtttgaatgaatgtagtaatgagaatgagatatcaaagcagaggtaaaagaattggaccaaaagaaggtattgggacataccagtgagccatttttctgaaggaatcagtaaattgtttagaagataattcaaactctttggggtgatgattatatgatttcagtacgtgaatagcctctcctggtgcttctttggatagcagaacagtcatttgactgtaaaatttctggtatgttttgataacagaaaggaaaaattattattttaaggatggactacagcttttgccagataacctaggagaatggcacattccttacagagaaaaaaagtgaatttttgtttagaagataccttgattggcttttttgttagtttgaaaggctgaagtctctaggcaatgtctgtaaggaaaagactgaaagaaaaaagcttagatttccttggcagagaaaagtaacagaaatttgagaaatgccctctttggccaaggttgataggagtaggaaatagaagaaaggagaaaggtttggagggagggagagagaggtatccagaaccatgacaaaaggaagatgttcatggagaaagatgatcaggaagactgaggaacctttcataaaagtgatctgtagacttcagcttgaaggtgtttctgcactgtgctgtgattatcctttgttcaccttaaacctttgtaaaggaactttgtactaataatacatgttgaggccggcgcagtggctcatgcctgtaatcccagcactttgggaggccgaggcgggcggatcacaaggtcaggagatcgagaccatcctagctaacacggtgaaacctcatctctactaaaaatataaaaattagccgggcgtggtggcgggcgcctgtagtcccagctactctggagggaggctgaggcaggagaatggcgtgaacccaggaggcggagcttgcagtgagccgagattgcaccactgaactccagactgggcgacagagcgagactccatctccaaacaaaacaaaaacaaaaacaacaacaaaaaacaagttgagtgaagaaggggtggttttctacacttggagtaaactgagtgctgaaaaaataagcagttgcaggaaacaaggcaatgaatgggggttgaagggcgctgggagcaggggtttggaaccctgagctgacagcagtgatggtggctggcagcactgacttaaactggatggcagggactgactcaggaatctttgacaaacctacttctctgtcaggaatctagaggaaagtggcccactggggtagggacaatactggaggatccggctatcatcatgtgaataatggctagttaggaggtcggcctttgggttaaataaaaatctcattatgtagctataaatttttatctaatgctttaagccttaaaattgcagacagaaaagaaccatttcagcacactattatgaggttcaaaaaatgatttgtggctgagtttgcaaggcttctgatttttatgggctcaggatcaaactcagctgtgttttttgaggtttggctactattcaagacacagctttagactctttgatgttttgaaacacaacgtgataagagatcaaaggagggaaaatgtattgcctgtaaggtctgatacattcattttaaaggcaggtgtgccttgcaaaaccagggtggatgcaaagtgaactgttcaggctgaataagcagctcaaagaagcagaaaattgtcttctatggtaacttaatccctaatgattatttctcgctacattaaaaaaaattagcaaaacaggcccagtgcagtggctcacgcctataatcccagcactttgggagactgaggtgggaggattgcttgagcccaggagtttgagacccccctgggcaacatggcaaaaccctgtctctacaaaaaataaaaaaaattagcagagtatgcctgcctgtggtcccagctactcaggaggctaaggtggaagaatcacctgggcccaggtggttgaggctacagtgagccaagattgtgctactgcactccagcctgggtaatagaatgagaccctgtctcaaaagaaaaaaaaatagcaaaacaaacactccaggatcaacttttccacttttcattaagccattttgtagtcctacattttgtaaatgtttatcctctaataatctttttctattccctggacctgattaaagtggcccttggccaggcgtggtggcttacgtctgtaatcccagcattttgggatacctaaattcaggagttcgagaccagcctcgccaacgtggcaaaaccctatctgtactaaaaatacaaaaattagccgtggccatggtggcatgcacctgtaatcctagctacttgggaggctgaggcaggagaatcgcttgaacccaggaggaggaggttgcagtgagccaagatcgcaccattgcacttctgcctgggcaataagagtgaaactccatctcaaaaaaaaaaaaaaagaaagaaaaagaaaaagaaaaaaaaatggctctttacctttggttttattactgtaaaaatataacagaaatcataaagccttaaaataccagctttaactgtacattatacatttaacaatttgaaatgcttactatgcgtgtcagccattgattttatttaattatgtttggtcttgattttatttgattgtgtatatattttgtgcccctcactggacaaattaaagaatttacaatctcaggtagggaaatactatgtcatagaaaatggcattttatgttatcattaccctattgccctaaagcttaatgaatataagctttagaaggcctttatcctataaaggaatataatttatgggtgattaaaaatggcatttggcatcaggctcttaattagatgtgaaacctgttaattgtttgtaataaaattaagacagtgaccattagtttgatcgtaccagacattttaaggaatgtaatctgcataaggatgaagactgcttgtgctgtgtataaagtgttgtgtctgcccactccctctgctttctggggaatgctccctccttctccactcacatggttaccatgggaacaaccattttgggtgatatgacaccctggacaacacaaagctgaatgatctgcaagtggatatctgaccaaaagagggccagaggctttctgcaggaattctggaactagaactgagacagaaccccagtgtttagccaggtgctaaagatagtaaatgcagtttttccatcagtggtcgtatttttcactatgtggcctaaagaaacagaagaagccagcctgcagagaaaatagaatgacaaagatattggggcagtgggggagataatctcccatataaattcccacagatggatttcatgtaatatataaatttaatatatttaaatttttttgagagcaactttgagctagcttgtagtttcattccctatatctttcccaatatctataaattagtccaatttgaattttagtccccagcaagatccctcactaatccattcagtggctacccctcacccggtagactgttctgcctatccacttctgctactgaaattcagcacaaccacttgctcccacccacctcaactcccccgcaacacaccagcaagaatagagaagtccctgacttcactggctataattttcatttttaaaaattatgatacaatttataaatagtaacattcaccctttttagtgcacagttctgtaatgaagaacaacagttccatcaccctaaaaaattctcctatgccggctgggcacggtggctcacgcctgtaatcccagcactttgggaggccgaagtgggcagatcatgaggtcaggagcccgagaccatcctggccaacatggtgaaaccctgtctctactaaaaatacaaaaattagccgggtgtggtggtgtgcacctgtagtctcagctactcgggaggttgaggcaggagaatcacttgaacctggcaggtggaggttgcagtgagtcgagattatgccactgcacttcagcctgggtgacagagcaagactttgtctcaaaaaaaaaaaaaaatctcctttgcctctttgtaatcatctccttttcctgtcctcggcctctggcaaccattgatcagttttcagtccttatattttcaccattgcaaaaagattgggtaaacagaatcatatatatgtagccttttgagcctggcttctgtcagcataacgcatttgagattcatccatgtcgttgccatgtattaggagtctgttgctttttattgctgagtagtagtccattgcatggatggaccacagatcatttatccattccccacttgtgggatattttacatatttccagtttctagcaattacaaataaagctgccgttaaccatttatgtatagtatttagtgtgaacataggttttcctttcacttagataaatacctaggagtagggctgttggggaatgtcaactttttgttttgttttattgttttagccattctaataagggtttgtgatatctcattgtgattttaatttggatttctctaatgactaatgatgttgagcatcttttcatgtacatttttgctaccatatctcttcttttatgaagtatttattcatatcttttgcccctttttaatttcgttgctgaattttgagaattctttatatatattctatataaaagtcaatggcttgtgttttgaagtgggtgttttctagtctccgccttcttttctcatttcccttttctcatctatgctatctgtgagggatgctctttttcagcaatcattctggttgctgtgactgctgttcaccacctctttcttccctccttttctcttttcttatttgatttgagttaatacttccatatatataattcattcattcagcaaataattatggagcatttcatgttaaagctgacttttttgaatttgccagcaaacacaagggcttcttcaggtttgggatcttattggttacattgtatgtaaccttagaattgccagctaatttttggcattttgggccatttctggatgttgcttctttattatcaaatatatttttagggtttttctgtcttttttttctggccacttctgagtccagggcttgagatctggcagcctgcgggttgcaaaaaactggttttgaaatagttaaggtttcactccagttagatttggcatgacaaattgatagctacaaagattaacgtgtaatgtagagatcattattcaccagcttgtacctgtttcagtgttctgtaatcctttctattctaatcctttcctctgttttgggaagcggtccctggtagcagaacctgcttttgttatccacagggggcttcctttgcctttgcacacatttgctaatgaactagaagaatgttttcctctatgtaaaagttggatagagttctgcagagcttcatttctactggaatgctgtatggaatgttcttgtgacatttcactgggaagtatgaaaaacatgttcctatgacatttcaaagagggttgatatttattctgcaatattacactgcagggtctagaaaggtttgaacgaaacagatgatttctttcattttaaaatcaatttatgcttacagctatatctttttttatacagcaaatatagtctttaacatcagtataaataaaatttatgtaattcaacctttttttttttttgagacagggtctcacgctgtcacccaggctagagtgcagtggcatgatctcagcttattgcaacctacaccttccacctacaccttctaggctcaagtgatcctcccacataagcctcccaaatagctgagactataggcatgtgccactacacccagctaatttttgtatttttttgtagagatggggtttcaccatgttgcccagactggtctcaaactcctgggttcaactgagcctccaggcttggcctctcaaagtgctagaattacaggcatgagccaccgtgcccggcctataaacattttttagtgttttaaaattatgagagcaactgattttggagtattcttttaaattgaagattcacctactaattggtttttgtgtgaacatagttttcatttctctgtgatagatgccaagagcgcaattgctgttatggttagctgcatgtttagctgtttcaggaactgctaaagtgttttccagattggctatactgttttacatttccactacaatgtatgagtacagtttctcttcattcttgccagcatttgatgttgttgctattttttattttagccattctgataggcatgtaataatatttcattgtggttttgattttcatttccctaatggctaacaatgttgaacgtcttttatgtgcttgttgccatctgtatatcctctttggtaaaatgtgtcttcatgtcttttagccattttctctgttttgtttatttttattttattttttaagtagagatggggtcttgctatgttgcccaggctactctcaaactcctggctcaagtaatcctgcttcagctttccaaagtaatttcttgcctgggattataggcatgagccaccccacccagccttttatccattttctaattagattgcttgtttgtttgaggcaggatcttggtctgttgcccaggctggaattcagtggcacaatctcagctcattccagggctcaagcaattcttgtgtctcagcttcccgagtagctgggattacaggcatgcaccaccacgcccagctaatttttgtatttttagtagagacaaggtttcaccacgttggtcaggctggtctcgaactcctgacctctggtgatctgcctgccttagcttcctaaagtgctgggattacatgtgtgagccaccatgcctggcagattgtttgtttttcatactattaagttttttgggctttgatggggggttgggttttggagggagggtgtttggagagcatgggtttttttttttttttttttttttagacagagtttcgctcttgttgcccaggctggagtgcaatggcacgatgtcagctcactgcagcctctgcctcctgggttgaagcgattcccctgcctcagcctcctgagtagctgggattataggtgcgtgccaccaagcctagctaatttttgtatttttagtagagacggggtttcaccatcttggccatgctggtctcaaactcctgacctcgtgagagcatgggtttttatttatttcttttttctctttttttctttttaatttttgtgggtacatagtaggtagtgtatatgagatattttagtacaggcatgtaatgtgtaataaccacatcatggaaaattgggtatccatcctctcaagcatttatccttggtgttactagatcttattcattgtttctattgttttttgtacccattaaccatccccatctcaccctgacacactcccctgctacccttcctagcctctggtaaccatgcttctattcttgattttcatgagttcacttgttttaatttttagatcccacaaataactgagaacatctgatgtttgtctttctatgcctggtttatttcacttaacataatggcctccagttccatccatgttgttgcaatgacagaatctcattcctttttatgactgaatagtactttattgtgtatagggtaccacattttctttatccgcattttctcatctgtttttggacatttaggttgtttccaaatcttggctattgtgaacaatactgcaacatatatgggagtgtagatatctctttgatatactgatttcctttcttttgggcatatacctaagagtaggattgctaaatcatatggtatctctatttgtagttttttgaggaacctccaaattattctccatagtagttgtactaatttacattcctaccaacagcatatgaggggttccttttccccacatcctcaccagcaatagttgttacctgacgtttacatgaaaggcattttaactgtcgtgagaggatatctcgttgtagttttgatttgcatttctctgataatcagtgatgttgagcaccttttcatagaaggcctgtgttctgtaggttttctcttcactttgttgattgtacccttcactgtgcagaagcttttcaatttgatgtggtcccatttgtccatttttgctttgattgcctgtgcttgtggggttttgctcaagaagtttctgcccagaccaatgtcctggagagtttccccaatattttcttttagtagcttcatagtttcatagatcttagatataagtctttaatccattttgatttgatttctgtatgtgacaagagataggggtctaatttcattcttctgcatgtggatattcagttttctctgcactatttgttgaagactgtcttttcccctcaatgtatgttctcagcacctttgtaaaaaatgagttcactgtaggtgtgtagatttgtttctggattctttgttctgttccattggtctgtgtgtctatttttatgccagtatcatgctgttttggttactatatagctctgtagtataattcaaagtcaagtcatgtgatttcttcagttttgttctttttgctcatgatggttttggctattctgggttttttgtggttccatgtaaattttaggatggttttttctatttcgatgaagaatgtcattggtattttgatagggattgcattgaacctgtagattacgttgggtagtatgaacattttaacaatattgtttctttcaatccatggacacggaatatctttccttttttgcatgtcctttttaatttctttcatccatttttttatagttttcattatggagatttttttacttctttggttaagttaatttctaggtatttaattttatttgttgctattataaatgggatttcttttttgatttcttcttcagattgttcactgttagcatatagaaatgctactgatttttgtatgttgatttttgtatcctgcaactttattgaatttgttcatcaattctaatagtttttttgtggagtctttagttttttccaaatataaggttttatcatctgcaaacaaggataatttgacttcttccctaccaatttggatgcccttcatttcattctcttgtttgattgctctggctaagacttccaatattatgttgaataacagtggtaaaagttgtcatgctccaaatctaagatctgctactgttgtattgggatctgtctctcactttagctctaataatatttgcccttcatttcattctcttgtttgattgctctagctaagacttccaatattatgttgagtaacagtggtaaaagttatcatgtcccaggtctaagatctgctattgttgtattgggatgtgtctctcactttagctctaataatatttgctttacatatctgggtgctctagtgtttggtgcatatatatttacaattgttaaatcctcttgctgaactgactcctttattattatataatgactttctttgtctcctcttacagtttttgtcttgaaatctgttttgtctgatgtaagtatagctactcctgcttggttttgtttgtttgttttcattagcatggaatatctttttccatgtctttattttcagtccatgtgtatcttcataggtgagatgtgtttcttgtaggcagcagatcatttgggtcttgtttttttttcatccattcagccattctgtgtcttttttctttttcttttcttttttttttttttgagacagggtctcactctgtcatccaggctggagtgtagtagcacaatcacagctcactgaaccattgacctcctgggctcaggtgatccttacacctcagcctcccaagtagccactttatgtcttttgattgcagactttagtccatttacatacaatgttattattgacaagtgggggcttactcctgccattttgttatttgttttctggttgttttttagtcatctcttccttcttctcttcctttctatcttccttttaatgaatgtgattttctctggcactatgctttaatttcttgttttttatttttttgtgtatccattgtatttttatatttgaggttaccatgaggcatgcgtataccatcttatagcccattgttttaaattgatgacaacttaatactaattacataaagaaatgcacagaaagaaaactaataagaactctacaccttaacttcctccccctgctttttaacttttcgttgtttctctttatgtcttattgcactgtttatatcttgaaaagttgttattatttttggttggttcatcatttagtctttctccttaagacaagagtagtttacacaccaccattacagtattatactattctgtgtttttctatgtgcttcctgtttccagtggattttataccttaagatgatttcttcttgctcattaacatccttttctttcaggttggagaactacccttagcatttcttgtaggatgggtctagtattgatcaaatccctcagcttttgtttgtctgggaaagtctttaattctccttcatgcctgaagggtatttttgccagatatactagggtaaaagatttgtttccttcagcacattaaatatgtcatgccactctctcctggcctgtaaggtttccactgaaaagtctgctgccagatatattgcagctccattgtatgttatttgtttcttttcacctgctgcttttaggatttttttttctttgatgttgggagtttgattattaaatgctttgaagtagtcttctttggtttaaatctgcttggtgttctataaccttcttatacttgaatattcatatctttctctaggtttgggaagttctcggatattatctcttagagtaagttttctacccctatctctttttctacctcctctttaaggtcagtaagtcttagatttgccctttctagactatttcctagatctcgtaggcattcttcattgttttttattcttttttcttttgtctcctctaactgcatgttttcaaatagcctgtctgcaagctcactaattctttcttctacttgatcagttctgttaagaggctctgatgcattcttcagcatgtcaattgcattttcaactctagaatttctacctgattatttttaattatttcaatctgtattaaatttatgatagaattctgaattctttctctgtgttattttgaatttctttgattttcctcaaaatagtgattttgaattctctgtctgaaaggtcatatatctctattgtcccaggattggtccctggtgtcttatttagttcagttgttgaggtcatgttttcttggatggtgttagtgcttgtagatatttatcagtatctgacaggacagtgagatctaggcaatctcaataatccttaatttccttatttataatatgtatatatacatatttacatttgtacattttataaaacatatattatacatccttaatttcttttttataatatgtatattataaggtggttgtatgcatgccagaaaaaaaataacaaaaagaatatgaaatttaaaaaaataaggttgttgtgaaaattggataatacctgtaaagctcttagcataagtgcctggcacagagtaagcactcagtaagtatttgctgctgtgaaggtggaggtagaggtagtgggaaagaggaggtactgatcgatgtggcaaaggacatggttgtagtacagagaggggcactcatcccaggggagaaaactcctgaactgaatcttaaagaatgacagagttcatgaaaaaaggaagagcatcaacaaagatatagaaccataaaatgttgtgtatatgtggtgcagcaatttggtactaatagaacttgatgtaggaattggaagtgatagttagctgatgagactggaaaagttggctgctgtcaagtcattgaagggtattggactttctctctttctttctttctttctttcttttctttctctttctctctctttttttctgtctctctctctctctttcctttctttctgtctctttttttttttttttttttttttgagatgaagtcttgctccattgcctgggctggagtgcagtggcacgatctcggttcactgcaacctctgcctcccgggttcaagcaattcttctacctcagcctcccaagtagctgggactacaggtgcacaccaccacagccggttaatttttgtatttttactagagatggggtttcaccatattggccaggctagtcttgaactcctgacctcttgatctgccccacttggcctcccaaagtgctgggattacaggcgtgagccactgcgcctggcctttttgtattggacttttttctaagcaaaagggagacgttgaagtgtttaaggagagagatggcatggtcatatttgcatttctagctagctcactctgcagggtgaggatgctttgaagtggagacagtaactgaagcaagctctttcatagtttagttgagagatgaaggccagaactagggccatactgattgagaatgcaatgtcattgtattagtatgttctcacactgctataaggaaatacttgagactgagtaatttaaaaaggaaaggggtttaattgagtcacagttccacattgctggggaggcctcaggaaacttacaatcatggcggaaggggaagcaggcacagaccttcacatggcagcaggagaaggaagagtgaatgagcaaaggggaaagagtcccatataagaccatcagatcgtgtgagaactgattcactatcatgagaacagcatgagggaaaccacccccatgatccaatcacctcgcaccaggtcctgccctccacacatagggattatagggattacaattcgtaatgagatctgggtgaggacacagagccaaaccatatcagtcattcttgtacttatttttcatatagtaaactcaggtccagtccaagatttcttttggaaaaccaggctagacaggttgtaaggtgtatgagagtgcaggtcttgtccatgaggactctaagaagccctatccatgattgcatatctggttcctctgtctcactgattcggtgatctcttctgttcctctaggctagatgtgatttgttatgatcacctagatcaaatatttccagctaatggaaaacccactttattttttaagtcaaggcactagggtgaagaacagtgaataaagtgataacgtgaaagcaaaaaatactagaaagtagatctaagaaaaaggaatttggttctaacctacattttactaaaatcttattttcttcttctgttttccttccttattcatgaaggtttaaaaatgataatcataatttttttcttgcataaaggtagacagtgaaaaaacaaagaattcagttctgtcatattcactttatgtccttccatgctctgtgggaaatggatttctcgttggtcaaatttcccccagcacacatcctgtggcaaggagctgcatccattttgtagactgtgtttgcaagcacagcttgttaggggtctatgggaagagtaagttaacgtttttttgcatattagaaaggatggtaccatttctgtctgtgtgtatatatatatgtatatattccacatactatacaattcatccatttagagtgtacaatttaatttctgtttgtttctttaacagggaaaaaaagatgtgacccagatatttaacaacatcttgagaagacagataggcactcggagtcctactgtggagtatattagtgctcatcctcatatcctgtttatgctcctcaaagggtaggtacatggcttcctttcaagtagggctaagtttttaatagttgttaaaagtgcatagcattagtctcatttgagatatgatgagttcccttttggaactgcagtaaaggtatttgtcatgtgtgaggtcagccctccagatctgtctctatgattactgcagcaaaatcctttctttgcaccttaatgtttctaaatgttatgtttccatttactgccttcctttcctccacatttctgctatttctgtctcttcctattacagtattgcttatgcttccctatctgccctattcctagctgcccacttacccttttcctgcttgcatgagattgaatgccctcaccacgcacataagcacacacatatatattctggttctgggaaatgaaatacaggtatgagagtttttccagtagctagcatctgccaaggtgaatgtatatgggtctatagggaagccataaaactgaagtcgaggtgggtgatagaatccctgattattatttttatgtatacttatttataaatgtttcttgggcatttggaggctactctgaatcataaagactggagatctaggtgtagcaaagcttgaggacagcagaccatcttcttcctccccttgtctttctactccaccatctcaaaccaggacgtctctttattttattgtattcctgttttcaattctgctgtttcatacctagtccatctcacctgtgttcattttctctcttgtacattttaaatatttaattgtatcaaaataatacatagtttaaaaatcagatatatcaataaatagcagttctttgtctcttttttcttttctttctttcttttttttgagacagcgtcttgctctattgtccaggctggagtacagtgatgcgatcttggctcactgcaacctctgcctcctgggttcaagcagttctcctgcctcagcctcccgggtagctgggattacaggtgcccatcaccacgcatggctaatttttgtatttttagtagagacaggttttcactatttggccaggctggtctcgacctcctgacctcaagtgatctgcctgcctcagactcccaaagtgctggaattacaggcgtgagccactgcgcctggcctctttgcctctttcttctctatttttcagtcctattacccaaagacaaccacttttatctcttttatttgttcatcattgttttcatcatatatttacctctgtgttacaaataatgggcttatactaatttttcacttatcaattttaagcagtatctttgacaagataaactagatgatagtctttttactgccaccattattctatttcctttcccttatcttcctaataaactttatcataattttaaattttaataatcacatttagattattatgattgcacagttattattcactagtgagcaaagtagtgtactatgattacttttgttttgggtacaaaataattgttttactggagaattgtttctttcagctctggaaagggaaagatccttgtatcatctattagttaggggatacaaagcttctataacacatagaccccaaagtgaattggctccacaacaagataagtatatttctcatgtaatagtgcagagcagatgttctagttcatcagggggttctgtcatcttcagcatgtgctatctaagatcactttgttcattgccatttcggcccacagaaaggtgaaagtatataagagattttatgtgtttggagaatgacaagaattctggtgtgactagagttctgtgtgagtcagagggaagggtgccgtatgaagttggaaatactgagaccagatgatgaagagctttccaagtcctactagggagtttgaatgtcattctgtaggcaacatggagtcatccagggactagacatgaggagttctggtggcaacatagaaaatagcttggggtgggaggctgagattccagcttggaagagtctggggaagagattatcatcagaactttaatggagatactgagaatgaagagaatgcgtatttgaaaacatttccatttctttccaattcaaaagtaatacatggttattatttaaaaactaaaacattttagaaatgtagaacagaaaaagaaagtacatcccataatctctccaaacgaaatcattagtgacaatttggggactacacctctggttttaattctctattgcaatgattattcttctgtttttcaacccaaacttttaactcattccttcacatcctgttttgtataaaccatttactcattgtttgctatgtgccagctgttgtaatgtctttacttatgttatgttgtttactttccaatactatgaggactacatattatttttttaccattttacagatgaggaaactgaaactcagagagagtaaggatattgctcaaggttatatggctaatacatgacagagcctagttttccatgcagatctgacactaaatcccatgttccttaccattaatatacctttaagaagattcgaggactgttcaaatgtgaagggagcgggaattgttgatgctcctgaggacagggtagtggaacagttgtaccataatcagttttacctgttaccattttctttttttttttttttgagatggagtctcgctctgtcgcccaggctggagtgcagtggcgtgatctcggctcactgcaacctctccctcccaggttcaagcgattctcctgcctcagcctcctgagtagctgggactacaggcccatgccaccacgcctcactaattttttctatttttagtagagacgaggtttcaccatgttagccagatggtcttgtgatctgcctgcctcggcctcccaaaatgctggaattacaggcatgagctaccgcacccagcccctgttaccattttctaatttagcactgaatgctagagatttagcccttcttaaaagtcaggatttttaccgaattatccttgtgaagtcactttaaaacctagggcataacttgattggtacatttacacatcaaacaataatataaatgagagtatgatagtaacattctgtatagaacctaagtctaaccataaagaatataagacaaaaagcaattgatacttgtgtatcaaagagaattatctggatatgtggtattaaacatggtaaaatgtatttggagcccaagttctatgaaaagattataaataaggacttactcactctaaatgaatttgtcttctggctcaggcaaatgacattccagggtactgagagaacttgagaatgaggtcactgaacagctctcagtgatccataaagaactgtggccagtggactatgttccagaaggctgatgttaaaatcataaatttctcccaattatcctgtttttttaagtttattataaaaaattttaagcagtttcattttggcagttattttgtagatggtgctatgtagttcatatttcatcacattaggagatgtacttttagtaatgctaagactgagcaatgggttcagttggtgacagtctaatccactataaagtttcccatcaaccttaaacttaattgttttaccatccattgatgaacattgcctgattccgtcattttgctagaggtgacaaaaaggtaattttgaattctgtcattccttttgtattttttattggctaaagtagttttatagagaatactgtcattcacccaccacagcttcaggtgttagaatactctgaagtataattcataccagagaggcagaataaatgctcaattcttttcttttaattatcattttagagaaaaataagatatcctaggaactttcatcggtgtctaatgagttatttccctccctccccctgcctttatatatgtgtgtgtgtataaatatatatatatatttatatatgtacagagacacacactcttctagtatctgatgaactaatggatttaatgttttctatatgtcttatttagttctacacatgtttttttaatgctcaattggccatctgtggccccttctaggtgatatctcttaacatcactaaaatagtttctgagagcttctttgctttctggtgtaacgagatatgccacccaacttgtacatttgctgacaaagacctgaaatttctaccaaggatgttggttctttttagagagaaatggttcttagagactacaatctggttgctaggggtgctcattgacattggattgttattgcttctaggcctttttggtggacagaactaactcattattttatttatttatcgagacagggtcttgctttgttgcccatactagaaggtagtgctgtgatcacagctcactatagtctcaacctcctaggctcaagtgatcctcctgactcagcctcccaaatagccgggactacaagtgcatgccaccacacttagctaattaattttttttttttttttgtagaaacagggtcccactatgttgcccaggctggtttcaaactcctgggctcaagcaatcctcctgccttggcctcccaaagtgctgggattatatgcatgagccactatgcctggcctaactcattatttttagtcagcaaatgtttctagattagaaacatacgttcttgactatattgaggaggccaagtgtttgttgaatggcattttacaaaagctttccaggtatttcctggccttgtttacttccagcaataatcacaaaagtcattttcccccttacataatgtaatctttgttcttaaattgaaatattcttgcacaagatcattcttctgaccattttctgtgtaatgattactgtagctcactgccagctgagaccattgctcttacattttggctttcattaaatttgagagagacttttcattatgctgtcattatttgatgggcatgcctagatagtgccttctccacactgacacagttcattatagtccagactatatgatctaaattacaaatcaagagggaagataagattcagttctataaaatagtgattcagcattcatcagattaacctttactggggacctgccatgggttagccattgtggaaaatgcagtaattaggcaggatccttgccatcaggaagcttatctatgagtagaatagattaggtgggatacatattgattctttaacagacctaaggatattaatgttagtgggatttgaaacttaacctaagcttatcttttggagcacttctttaaatagtaagcaataacctatcaaaagtcaatatactagagggtagtcaggtagaaatgatctatgtgaattataaatcacttaaagagtactgaggagaattagaattccctatatatctctgtatatccctatgtatttctgaatttaagaagttgtaatctcagaatgacagatgtcaaactgctgggatgaaatgacaagtgtgctgacccagaggagtcttggttttttaaaaacattcttttgattctcaagaataaactgtcagtgcatcacagatggtttcaataagcttcacgaaatgaaaggaaaaagagaactaattatacccaaaagttagagtggaaactttttatagatggtcttagtttggaaattgaattaagaaatgagaaaatgttggccagagatgatgcatattttgtatacgtcagagtttgactctcattagagtactctagtattaagacatttcttcagtttgaggttcattaaattcattatatgcatgcttcgtgaaaaacattataataggcactcttcggagactggggtagggacaggagaaagtagcaataaatgacatagacaccaaatggagatggggataggggaggagaggagaaggtaacaggataagtaaaacatatccccaacaattaaattgattgtaatgaagaaaatagacctatagcaatttactgcagtataacataatacagaatgaaaaaagtgttaaagagaaattacagacaagctgttatttgagtgtgaagggcagaaagaataatcctgaattgtagtgattaggaaaggcttcaaggaggagatggcatttgaactaagccttgagagatgagaagcatctgagttgtgggaatgtaagaagggcattccaattgagggaatgaggggctccagggaaataacgaatgtgatgggagatgaaactgaaaagttaaggttagggccaaattacaaaaatccacatatatcttgctgatcaataagtctggattttaattgtccttcccttagattctttctctaggccaacagcctttattttatactctcttgagtactctatcaataaatgacagtgcttttctcctttacatttcagaacatatacccctctttacaacatctttaataaaaccccacctgacaactgttccttgtgagccaataggctgagtttcaggtttttctaataagagaaattgctagcactataaattggcattccttatattctacaaagaatcatgactatctgaatgtatcagcatttaatgttactatgagttattcagggaatactcaatatttgtgaatatcattctgcataaacaggacaaaaatgaataaataccaccctggtatctttgtttgctgtttcttctactaatatttgtaaatttgatattggaaagtagtctatttcctcaattgaatctttattcttgaatctgtctttcatgaaaattctataatcttataaagagtagtacattacttattgttcaacaaatgttgttactagtagttgatgagtaataaaatatcttaaagttttatagtatcataaaagttccataaaaactagtattcagttgaaatggtcaatgatatctctttaaaaatatggtcagattttattttattttatttttatttttggagacagagtctcgcttaactttccagggtcaagcaatctcccacctcagcctcctgagtagctgggactacaggcgtgtgccaccatgtccagctaatttttttagtttttgtaaagtcagggtctcagctaaattttttatttttttattttttgtaaagtcagccatgttgcccaggctggtctcgaactcctgagcataagcagtccatccacctcagcctcccaaagtgctgggagtacaggagtgagcagtcacgccccaccagatttttttttttggagggggccctatattctgctcacttcccagtgtatcacaactatatctttctttgttctattcttcctatatttaccacacaattgtcaactgtattatttcaatacagggcttgttgtacttgggctaagcattattcattttcttgaaatcttatcacacactggaatatatcttaaacttacttagagactgaatttgactttgagagattgttgttgtattagaaatggaaccaatctggtatgccagtcctgaattgtttcccacagtagacgtttcgtttgtctagcatattttttgctgtgagccatgattccacttaggatttaagtgagtcaatcagtccacagctatgtattagccacctactgcatgcaaatcatatatttatataggtctctcctatctttttcctaaagtccagataagtgtatcatactgccaaggagacctttctacttagatatcagccatctcaaaactaatgtggtcaaccacaaactcttaatttctttactaacttgttcctctactagtttattcatcttaataaatagcaccaccatctacccagtgattcaagccaaaaacataggaatcattcgtgaattctcagtttccaaatttattccctcacccaactccagctacatcatcagcaagtcttgttgactcttcctccgaacagtatccaccacctgcccacagtcctctgttctgctcctgccaccccaggccaagcccccgttccctctcctgggttctgctcctgttcttatatgtctcctgctgttttacagacattctcaacaagaagccagagtgatctttttaaagcataagttagtcttgtcaatttcttgctttaaactctccaaaggcttcccattacacttaaaataaaaccaactgcttaccttggctgacaaagctgtatctgatctgggatctggcccctgcccttctctccacccctgcctcatttcacaccactcacggttcttcctctacaatcgaatcacacaggctttattcctccttctctgtttcgccaagcctgttcttgccatggagcctttgaacagttttttccctttgcctggaacattttgccttttccttgagtctaaagtaaagtaacttaagtagtcactcacacacacacacacacacacacacacacacacacaatttagtcacctttataatgtggcgtattttattgtcaacagtttttacagcccttctcagtgtatgaaattatcttttcattgtttacattctgcctcatccccccacccccagctgtcaccatgttcatatttgagtatatctaagtgtttcagaatacactcaaattccagaatacgtctgcaatagtgccaggcacatagtagatcttcagtggatattgaatgaatcgtgacaaatggtatgtatgcttccattaatagcagtattgaaatggttcttttgatgccattaatattattttaataggataacagagttctctatttctctcttgtttacgctttagatatgaagccccacagattgccttacgttgtgggattatgctgagagaatgtattcgacatgaaccacttgccaaaatcatcctcttttctaatcaattcagagatttctttaagtacgtggagttgtcaacatttgatattgcttcagatgcctttgctactttcaaggtaattttttttttccaactcagctaggtcaatttatagtcacttggcccctgaagaggcaatttaattttaaaaagcaagaaattttacttcttaggcctcagtgtagccaaccatgtatgatgtggatcataagaggaatctgtaaatagaatgcagtctatgaggccagtctgtcctattgcaggaaaacaactcaaaatatttgtcacaagctcaaatggagtgaattccagtatatacagttacgtgggaaaggaatatgtagtgctctgtgtgtggcatgctgtcatttatgttaaaaacagattaaagggcataagcttccacttaaggtacatatgcactgaatacctctgcaaggatgcataggaaacagcaacagtgattaattctggggaaaggaactaggtagtgaagggagatggagaattacatctttgaatatgaaggacatcatgttattttatgaatgaaatttttaaatgtccacatggtgaaacaaaatagtaagaaattatattgtcgttgtttcataatcatctatagtttgatcatgtattatctactttgtcactatgtaggaaatcgtaggatgcaatatattcacattgttaggcaaccaactaccagaacttttttattttgaaaaattcaaactctacctctatacttattaaataataactccccatttcctcctccctccagcccctgacaatcattttacttttggtttctgtattttatcatcaaaaaaatgttcagagaatatatcagaaaagagtgcagctaatttgcagacaaacataccaaaacttagtcatctaatgagtgatgttacattcgagatttctattttagaaaaccagttacttaggcttatgatcctgctattatttaacatattttgaagttggtatcaatgtgtattacatgctcatttttcaataatggcaaacttttatcattcaagggcagataaaagttttggaaacaaaagcctatttgacattccggttagtgtataaagtgggtgatcaagttagctagaattatttggggagggataataattataagaaaactaattttaagatataaatagaaataaaatagatatgattttcttcaatgtctaccaaatcagctctgaagctgtttgagaagaggaattcaaaaaatactatagactgacaatgtaacagcatcattgaaaaaaataggttttcaggtttaaaaagtaggtaagactcatttaaatgtatatatatatatatatatatatgtattcagattcatttcttcaaaagcattttagcaatttaattgttctatttacataactccaaattaatttatacttttttcaggatatacgtatgtaacttttttttacaagttttacttaattgtaatccatgtatgaatttttattttttatatattaccttaaatatgtatttcaataatatcgatatagtccatatactaatattaatacatactccaatcgtattactttatgaacagtgattgaaagttgcctatgacttagatggtaaatagttcttttaaatagctctccagaggtggaaaaaggggaaagcagtggtttgctctgctgaaaactacctattatctgcagactaggaagttacccagcctgttctgagaaggtgccataaatctgttgaaaggtatattaggtcacatggtgacacaaagtgtgagagagtgtcagagagtggtaaagggtaggagatgtcagtggggcagaaggaagctgggacttagggagaagaatgcctggcggagggtgagggacggggcgtggtctccctggaggcggagcctgcaggctgggccgtcagagagatttgttgtgatggagaagaccaaagagtggtgggtggttaagcgggaggcaagtcctggcagctgcctggcacacgatctataaaggcaaccaggccatctctggaaatacaggatgcaaaggaaaatttaattgacaagaactctggagggagaatactgtttgagaatgatgggaatatttggaagccacttggggtgggctgggggtggattccagggcaggcttaagcaacagcagctggttgttaacagctgcctaggagcagggtaagcccagttaactgcagcactttttgagacaaggtctcactccctcacctaggctggagtgcagtggtgcaatctcagctcattgcagcctcagcctcccaggctcaggtgatcctcccacctcagcctcccaggtagctgggaccacgggcgcataccaccatgctcggctaatttttgcatttttagtagagagggggttttgccatgttggccaggctggtctcgaactcctgacctcaagccatccgcctgccttggcccctgcaaagtgccaggattacaggtgtgagtcactgcgcccggccactgtggcacttttgttgtcgtaagcaggagggtgtgcgggtttcggacaagcactgaattgcccgagacatcagaggaaaggaaccgcaatgccatcatttccccaaagcctcaggcaaaactgcaacaaacacaaggcctctagcgtccgggtttgaagggaaggagtttgcagcctgctcgggtgtccacaggcctccattcagcctgccagcgtcctatggtctccctgaagaaaacagggaagagaggaggagcccacaggggaggtctgggtagacagaaaagggcaaggaaaagaaggggaagggaagaaggggagttaacgagaggcggagtatgaagaatgggaagcttggagtaaggaaactgaaatctcgggagaacagccgagtgagggaaggaaggaaggaaaagaaggaggaagggcttgggaacagactcctggaagtgactgctgggtgaagggaggggcggtgagggcagcatggctccgggctccgagtgttggaaatcccaggagtggctgtttctcaccccggaagacaaaaattgtacagcggctagagatgatcccctcaaaaggtggatctagagctagtggtgagataggcctcggttgcatccaacatgaagaatgacattaaatacaaaggatgattccatttctttctaccaaaatgtctgtgtctaaactactaaggaggtgtttgctaataatagacactacagtcccatttttttcccctttcctatcagatggctcttcgctgtcatggaaacaagtaaattcattttttaaaaaaaagtaagccttcacataattacaaacatagaacaaacgccaatagaggaggaaagcaaatacttaatatgtatttctgaaaatttccccaaaggtttttaaacatttgatagaataagatgtacttgatagtaatttcttgctgtcatatattcagcccaatttaattttcagcaacaatattgaatgacaaaaataaatggtgttttgatttgtatttaagccaattttccattgaatttaagtcaatcctttaaaatctaaataatcataaaaagttttctagtatgctgtcagttttggaaacaccaattttctttattttaccaaatgcttatggttaatataatgtaacaatgaccataaatcacttttttttttaaagtagctggtttcaaagggttttgtttggttggatgattgacttgattttggcattggttttgggttttttataacctcctaatctttttggttttgagctcttaaagggactgttgctcagtttagttattaatattgtaacattgttagttttttattttggcatagatttgtctaccaaaagtcttttcccaaaaaggattccatacaaccataatctctttcatccctccctctaaaaattcccataatagaagtggtttgaattctgtctttctctgccacctgataagctggatgtccttgagcaatttagttaacctttgagttttattttccacatctgaaatgaagaaaatcatccctttttcacggacttgtgaagatcagaaaccgtatttgcaaagtgctcggtacactccccagcacagtcagccctctaaacggcagctgtcgctggctcctcagccttttatgtccctgcaattaagtgtctctctcactctaccccaagtttctctcaagcagtattcattaaaaatatagatatcagatttttcagcataatatactatgcaaaacttaggcctctcaaaacagaattgttaggaggtaggatgaaagagtacactatttgaattaaggtttttaaattctaaattctttggagtttgaactttattttccttcacaattttctgtcttttccttcttgggtaggatcctagctgttttttttgtggtttctttttttttttttcactcagttatgtgatctataatgcagcaattatatttgtctatgtattatgtgtacataagcctgtgtgtatgtatatgtggtttgtatatacatttattatgtacataaatttgagggtatatccatgtatcaatcccattacacactggagtggaaatgtgggcgtgagagagggaatgtgtgcattgtttattggctgtatccatgatatatatatatatatatatatatctagcatatatatatatatatatatctagcatatatatatatgctggaggaattctaccccaccctattatggtttcctaatactggattttcaagctgtttcaaggttttcttgccttggaatttgaaagtgttggttttaacctaactccctcctgatccctttttctttggggtaacactaatgtatgacacaacctttcaaggcagcactgatctgcaacctgctctttttgttgccactggggctgtgtgcgctgggcctgcagtgtggggaacccagtcctcactttcaaggctgacgatagttgaagcaggtagagaactcccatgggtgcagcaatccacagtgtctgctgcagcccatagagggggctccctctgccctggttcagctcagaaaatttctattactgctcatggggtttctatgatgttaggggagggatgcttgaaagcatgacaccaatattatcctttaaaaaaaagagtagggacctcaaaggatcttgtggaactaccttactctttcaagggtcccctgatgcaggaactagtttgaatcaagacctttgacggggtgggaacggaacccctgtaaatggttttccattttagaacttcagttccagagtggtaatgaatgctctgctccactgggggggaaaaacaccatgtttccactgataggcccagtggttgatcaagttgtgtgatagcaatagggaattaagagccactcttattatttttgaatttgaaaattatagtacacaatgctttaaatattttactttttaaaaaattaaagtagaaataagtgggttttattatggttgttatctgccttttctttgtgaagttatgttgtgtaccttctatatgcttttaggaaattttaattaaatatgtattaaaagaatttattttggaaaactttaaaattcttgttatgtttttaattaaatttttcatagcacctagacagggcatttagcctctaagcatataaaagggattaagtgaggcttgttttcctacaacattaaagtgagttaaggatataatttaggtatgagttgaagacagtcaaatgtttcttcatgctttgttcagttttctgcaagtttatatctgccataagatagggctactcatcttcaattttgaaaggatggattgtgctacttagtaacttgcacaacaccttacatcccattaacccaagagcaggaacaatactggtttgacactgctaaatgtcagtcctacgcttccagtatccgaggcgcccattttaaaagtggttaaggcactttgggaggccgaggcaggtggatcacaaagtcaggagatcgagaccatcctggctaacacggtgaaacccgtctctgctaaaaatacaaaaacaaaaagccggatgtggtggcgggcgcctgtagtcccagctactcaggaggctgaggcaggagaatcgcttgaacccgggaggcagagcttgcagtgagctgagatcatgccactgcactccagcctgggtgacatagtgagactccatctcaaaaaaaaaaaaaaaaaattaactcatctcaagttccatttgtttcaccagttaaattatttctatcataaatctaacaatatgaatttgaaacactaggtttaacaccagagtttttcttttctaacatgaaacaaacttgtatttcacatcttaggctaagctaggaatggaaataattttgtggcgcaaatgaaaatgttcttctgcaacttttatatgttcttaaaccttagaaaagacacatttgtaatattaatagctataacagttttgtttcacttggtttttctttttctaggatttactaaccagacataaagtgttggtagcagacttcttagaacaaaattacgacactgtaagtagaaatcatttttaaagactttcccactttctctctccctcccttttagatctatgagcaattgcccctgtgaattatccacaagagaaatcagtcgcattcaaccatactcctgatttgtctacctggaaaccaggtcatcaggaaactttatggaaaattgagatggcaggaggtcagggctttcacctttttcacatctcttcgtgttgtgctctgaagctcaataaatgactagcacctgcttgctttgatgttgcaaatcaaaggaggcagtaggtaactccaaaaggaagagaaccccaccctcactaaagtacatcattttacttggttgataattagtcttacttagtagtaaaaataccagaaatattttttatcttgcaactcccttccctgacagtgaatccaactcatccttttgagatttggttgaaatatgactctttagaaagctttccctaatcctacccctcccaaaacatgcatcctttctctttctctctctctttctgtctctgtctctctcccctctcctctctcctctctcttctccctcctctccctcctctccccttctctctttcttctctctctctctggctccctcttatttttcaccttgtattattatggtgtgtctgtatctttctggctggcccttgcaccccctaagaggcaggaatcttatctgcaggacacagggttaagagcacagtatggactttagagtcttcgtgcttgcttggcttcaagacctgcctccttagtggccctgggcaagttactacacccactgcaaaatgaacatagtaataatacctgaatcatagggttgttgagggagtttgacgggatttaaagttttcagcacagtaccagagtaagcactcagtattagtttttaatcgttgttacttgttttcctaatgcctaatgcagtgtcatacatttggtggtgacagatccatccaaaagcaacgatacttttactaaatgtgtaagcaatagaagcagcattatacagtaaaatatagctcaaacctagaaggaaaactttgtatgttttgttctagtgttggttcagatgctctacctcagtgctgtccagtagaaatataatgccagccagaaatgagagccactatgtaacttaaaattttctagttagccacacaaagaggtaaaaagaaacaggtgaaattaattttaataatatacatctatttaacccaacatacgaaaaatgttattttaatgtacaatcaatatggaaaatgatcatcgcttctcggtcttttggctaagatgaagtgaaaaatgatcaagctattttacatccttttttcatgctgagtgtttgagatctgatgtgtattttacacttacagcacatctcagtttggactagccacatttcaagtgctcagtagccgcgtatggccctatgttggacagcatgcatctaaactaggacttagggaaggggagtctctgatcctcatcctagcaacagccacagttattttttactgggatttttggcatttttacatgtgttagttaatgttactactctgtctccatcacccagtctagtgcctgacacctaacagcaagaatgtaatctgctgtcttaaagcagcacttaactatttgtattattgatgcctaaaccaagaagttctaaatatttatatatatggtatgatgaatggattttttttgtcttcatctattaaaagcaaaaaacaatttcatgtgtatatgatatttatggtagtaataagtaaattaaggtaaagtatctttattgattgaaatctttagtattaaattaaattacatgtgcttacaaaaagaagtacatttttgatgattactatgactttatgccttcccaacagtatgcagtatagttgggcacataataggcatatggaccagtggtagcaaacaaatattaataatagtcctcaaggagtctctgaatcatttatatcctagacaaaggttgcaacatactcctgaatactgggaaggtgtggcctactctgcctatcaatagtatatcttcacacattcaaatcacaaatatttaactacttctcttttaattataaataaaataaattttatttttgccagttgtccttcaatttaagattaggaattagcaatataattataaaatcaaaagtgatttttatgtcctcatgttataaaggaaatagccacagaatcaactagagtatttgttttaagtgtaaaatgtgaggggaggatgattttttaaattgatacaaaataattatacatgtttatggggtacatcagatatgttgatatatgcatacaatttgtaacgatcacatcagggtaatcaggatgcccgtcacctcaaatatttatcgtttctttgtgttgggaactttccaaatcttctcttctagctattttgaaatatacagtaaattattaactatagtcaccctactgtgctgttgaatactagaacttatttcttctaactgtatttttatacctgttaaccagtctctcttcatcttccctccctcctaccttccccagcctctgataacctcattctactgcaaggagaataatttttattgctagaggcatcccaaaatgtatagactgaaagaggcgggtggatcacgaggtcaggagttcaagaccaacctggccaaaatggtgaaaccttgtctctaataaaaatacaaaaattagccagatgtggtggcgggtgcctgtaatcccatctactcgggaggctgaggcagagaattgcttgaacccgggaggcggaggttgcagtgagctgagatcacatcacagcactccagccttggcatcagagcgagacttggtctcaaaaaaaaaaagaaaaagaaaaagaaaattgtctatttttgaatttaggaaatgaactgttaatatatagtttggttgttcagtaactatatatgctagatggaatgttaaggaaagattcattagatgtcacatttataagaaataaaatttttaaaaggctaagataacgtggataaatctacaatatcaactaattactattttttcctatagaatgaatgaggtaaatgtgttgtgcagtaatgctttgtgttcaggtataatacatgacagtttgagagactaataaattcattctctttgactccttttttacctaattttgtttttacatccatatatcacttcttgtgtaatttagtaatttcacagctgctgaagctcctgcattggcctgaatgcgagctctgagaactcatgccccttcaaacctttcagactctttcagctgatatttctttagcagtatgccatgaaactggagcacatgatgcatgactctaaagtaataaagctggtggactcgggagtaggtcataccacatacatgtatttgcattttatatttactattcaaatttatcacaaggcttgtctgatgcatttaatgatccacaaaattctccttgtgtttcaggatagaataaataagtcattcatattaaagagtataattactgtgattttaatgtgagctacacctttgtatttttacttttcactttattctctatcggtgattgtcagcatgcacagcttgccctcattacacagcggcacacactctcccctcgcacttgactctccgagggctaggagtttgtcaccctcttcagttcctgatctcttgtcctccgtcctggctgcgctcattcctcccacttcagtgctctatgagctgtgtgcccacacctgatggaagtgaatgctgaacctccccagatgccagcactctgtgttaaactgaagggctaggccatggttggtgaccatgttaggaaagaagacttcgtgcaccagtgtccccagcttccggtgagagtgaagtgctccagagagactagttgggccgtcatgcaacaaaggttgcctcgttctttatctgtttatgcagtgaattgaacagtctgattctttatggcttgccaagtgaagccttaagtgtatttaatattttcccaaattgtggacccatagccaccagcaaggctacttacataaagatttctttaaaatggcataaaatgagttctcttgcaacttttactagaagttttattcaaaatgatttattggaaggactcaaaattactcagtttttatctaatttgcagaactaaaataaaatagggaaggatgtctcttgtaattcttgacctccctgtcccccagtgtcttcacatgtaaagaaggatggtaaaatggccagaagttgggaatttgctcctgaaaaagaaagcaagccagcctaatacggagaatccactgctgcttttacactctaatgtgtattttcttttcattagatttttgaagactatgagaaattgcttcagtctgagaattatgttactaagagacagtctttaaaggtaatatcaaatttctttaagtcagtgtccccgtaagtttatatctcattagcaaatgacgggtctattagtatatgagtaaacacagaaaaattaaaatatcctttttttaaataacttgagaagtatttactatattttatgttatgactgtattttatagcaaaataatgtaagtgtcctgtcctgcttttggaagtaacaatataagtacatgataagtaaaatttagaatatttctgctgaggccaggcatcttggcttacgcctgtaatcccagcactttgggaggccgaagtgggcggatcacctgaggtcaggagttcgagaccagcctggccaacatggcaaaaccccatctctactaaaaatacaaaaattagctgggcgtggtggtgggctcctgtaatctcagctactcgggaggctgaggcaggagaatcgcttgaacctgggaggtggaggttgcagtgagccaagatcgtgccaatgtactccagcctgggcaacaagagcggaactccatctcaaaaaaaaaaaaaaaaaaaaaagacatgtaaaatgcaaaaattaaaccttccctctaagttttaagcacagcaattgataaattcttaatatctgtatttttgagtataaaatagctttttactatcaaattatgtttatatagttgaaatgttatggggcttctgttttatgggaagcatttatctcccagatttgtaacatattttcctaaagaattttttatgctatatttcatcaccaggtcccattccctgagcattcacgacagtcagtgttttcctgcaggttgcttaaaatacttccaccacttaacatgacatgttcacatgatatttacgggagagattctgaaatatgaaacatggtcattccctaagaattagaagagaaatgttttttaaaaatcacctctaacaaacagatatgtcagaagactacatgatcgcatatacgaaattttgcttttcttttttacagtttttttttcttttattattatactttaagttttagggtacatgtgcacattgtgcaggttagttacatatgtatacacgtgccatgctgttgcactgcacccactaactcgtcatctagcattaggtatatctcccaatgctatccctaccccctccccccaccccacaacagtccccagagtgtgatgttccccttcctgtgtccatgtgatctcattgttcaattcccacctatgagtgagaatatgcggtgtttggttttttgttcttgcgatagtttactgagaatgatgatttccaatttcatccatgtccctacaaaggacatgaactcaccattttttatggctgcatagtattccatggtgtatatgtgccacattttcttaatccagtctatcattgttggacatttgggttggttccaagtctttgctattgtgaataatgccgcagtaaacatacgtgtgcatgtgtctttatagcagcatgatttatagtcctttgggtatataccgaaattttgcttttctaaaatactgccaggattacactgaaacagaatctggcaagagattaaaagacgatgcagctagctggaaatgaaaataaagccaattctcaattacccgtaaatagcatagtttgatgaattattggagaaggaggtgtgagggaggtaataagacattccatttagttaacaaatatttatgtgctcattctccagacatatgatgacagccaagaacagctctgggcctcacattctgttgttggaaaacagacaatagacaaataaacaaataaatacatagttttcagatggttttaagtactaaaaagaagagtagggaaaggagacagaaagcggcgacttgggagataggcgtgtgtgtgtgtgtgtgtgtgtgtgtgtgtgtgtgtgtgtgtgcgccagagcagctagacgatcagtgaagtccttgatgagttgatctttaaacagagggctaaatttatggaaaattaagatggctctgataagggtgtttttgtgtgtatgtgtgtgttgtgtgaaaccaagttacatctgctacttgaggttatgcacctattaactggctgtggaaatgacagggaacccaacagagtaagaccacatccatctataagtggccctctctcccacagtggaatggtgcctggaagcagccatgtggccagggggaggtgggagagcccctgaggggagggagatgtgggctggagttgtgtctctgtccttcagatccctctcagaatcccacaaaaagaatgttttcagcagatgataaaactgactgtttttagtgcagcaactcatatgatggtccagcttgctaaacatcacacttgtattgtcattttttcctattttttctaggtttgggatatagtgtcacacacttgtgttatttttacatgtcaagatgatggcattcatagaacaatgcatttgcttctaaatttggagtataattttaaactaagacaataaagtcaatctgttttgtatcacattttttgtcaatttactttgcccacgatcctgcatcagccatgacctggtttcctttatatttgtaccctcactgggtgttaatggggaggccatttttcagccagccatccagcactttttattgagtttcccctttgtgtagaaacttataccaggagacccatctagaaaaaaagcccagtagtgatgagaccaaactgtgtgtggaactgacctttgggcagagagtgacttcagcgctgtgttctcccatgtccagaaagcttgctaagagcagatgaagataaggttgtattctctttatacagctgcatacgtaaagaacagaactcgttatttgtagggctccacaaggatagccaaatgaggtaagcttgtccatggtacaacgagtagtggccctggaaggaagatggcaattggagtagtaaacagaggtgacagtgctctgaaggtccagcatataggaagttgctcataaattctccaaatccttcctttttttcaatgggagtctatcagatactggatcaaaatcgagagatttatgtgaactaaggtgattgaaccaaatttggaggaagaaagctgtttgtatttcctacttatttgcagatgccttagcctattcacgaggcatctttcctgtttttcattaattcacccagacataccatttggctgctattcctcctaaaatctttacagttaggcatctcatggatatctgatttatagcatggtaaaaccaagaattgataggacactggaaaaaaatgcctgacaaaatgcagataaattacctaagaatgcagaaagtattaaaatggttactggagagctggttttttttaatgttagattataggaagagatgttgccaaaatggttttgcatcactctgttcaagcaaacaaaaaggtagacgactgtgaaataagctcatatataaacatagagctcattaaatattgtttactctttttttttttttttgctagaaaaacattctggaagctccactgatgcaattttggtttttccttttggtaattagatctgtggtagcagtatattctattttgacacaactgtgtttctgtataaatggattctgtaatactttttacatagatgtttcataattgcaggaaacaagagaggttagattattatatagcaactttgtaagtaataaactgtcttaagtactaggctattttctgattccaaagtagttgctacctgctgccttttattaatcatattctaaattttcctgcactgcttaattcctggtgtcaataaaaaataattaacagagaaattcctttccatcatgtgacagagctttggaattttttccttatcttctgcagaggcctggcatttaattaccagcaagaaagattataattcaaaagaagcttggtggaaactggggaattttttgggctctggtcaatttcattaaaacacttaggtttctaaaaaacttatttccacttgctgcatggcttaactatgtactatgaggcatacaaaataagaaatttaaagaagtaaaatatgtgtgtttcccatttacttggtatagtattgctttatagtgctttgtattattctggaatgcagcattttgtcattgttaatattaaaatagattaacatttaatggctaaaagatttagtgttgaattaacacaattaattgtttcagaaaaattgtgaaattctattagcagaggatagattggatagaatttatatgtaggtatccccaggtaataaaaattgaagtgacctaatctgaacttaactcataaatataacttcaacaaatgtttattgagtgtgtgtgtgtaaattttcaaaaatgaaattttccttttgctgaagccttttaacatgagtgtatatgatatatatgtgtctattcagtatttgattatttttgtatatatctttagaagataagtaaggctctggacaggcttacaacccagaagttttttagtttttgttttttctttttggagggtctggaagccctacctttgaaatataagcatctaggaagataatactatctctctgtcacaaggagagtttaacctaggtgcccttttccaactatttgcttgtcagagagataagagaagttttattattcagataaatagctaaaacaaatggtcaccttaattgctaggtgcattagggggaaccatgaaagagtgcacagaaatggtagtcaggtcctcccccagtggacaggttacccttcatcttgaggatatatatatgtaatggattgtagcttcttgactgtaataagggatagttttgtctgtttgcaatctctttttcagagatgagttactgtattgtgctctggatatgtgggtaggacttttatttccccaacaatacccatgcacatcacacagttaggttgtaaggggatttgaaacacgcccttatggagcttattctttaaacagggtcacaaataactctgcactacaaggcaaagcaaagtcaactgtagagaagaggaaaggctttcccgaagacgatgtctgagctggttctgagaggatgggccaggtttgaacaggcagagaagaggtgaaagtgtttctcaagattttggagctggggaagtaaagccacagagacaggagagtggggaagatggaggaagggagctgaggaaaggaagcaggagaaatgattccacatcacagaggctgggaacggcatcttaatgagttacttttttctaaatctatgggaatctaggaatttgcttgtttattcgttcactttctaatctaagtggaattggtaacaaatactgatttttggaagatttctttgacaaaatgtgcagaatggatcggattaggtgaggactgaaggagagaccattttgcatgctgtggtagtaggtcagctgaaaggtagtgagggtttgaatgagattactggctgtgaacattgaatgaaaggtgttcaagaaacacttaaaaacagaaaattggtaggtcttagatggagatttgatgtgaggagcaagggaaagaaaggagctaaggaagaccaattctcttcccaaccggaggagggcagctcctggtgccattaacaaagagaagaaagggagttggttttagagacgctaagtgtgacagtccagcagtgttcaagtgcgactgcccagtgggcagttagaaatgtgggtctagaggccgggtgtggtggctcacacctgtaatcccagcattttgagaggccgaggcggatggatcaccaggtcaggagatcgagaccatcctggctaacatggtgaaaccccgtctctactaaaaatactaaaaaattagccgggcatggtggcaggtggctgtagtctcagctactcgggaggctgaggcgggagaatggcatgaacctgggaggtggagcttgcagtgagccgagatcgcgccactgcactccagcctgggcgacagagtgacactctgtctcaaaaaaaaaaaaaaaaaaaaagaaagaaagaaagaaatgtgggtctagagtttaggaaagaagcggagactagaaatgtagatttgggagacatcttcctagatgttacagttgaacccatgggtatagatgagactgttgggagataaaagatagcagatccaagtatacagcttggaaaattgctgcataagtagtgcaaaaggcaagggagccattgaagaggtagcaagggaacaagctgcacaaggtaggaaaccaggagcaaagaaagtttccagaaggtgttaggttaacgttagaagctgcagaaagatgaaggaggttgcagattaacagtttgactacgtggttgctattccatgtgtatgagaataactagtgaccagccaacatccaacaggggtcatccttttttcaggtttgacaaacgttattttcatgcattaaaataacctcaggttgtatacttctttcatgttaaatacacaaaagatacatcacaggcaaggtggtggtttactggcagccagatgcttgcacacatctgggactcctttgatagacagttggccctcagtttgatgtgcgcttttcttcccatccaggatttctgtaaccatgtaatgatgtgttactcccctgaggccttcagaaaaagtccagtaaataggacaattgaaaactaaacatatcttctatataaagttatattacagtatgtttcagccccctggctgctgaagctttaggaattgctacagcagccagggggctataattctgttctccagaattatggtgagaacaaaaagtttctaagatagagcaacaatacattcagccatgttgctagagggtcttcaactattcttactttgggtatttttattttgttttagggtaatgctgtatttggggaactatcaatttgtcaccaaaaaatgttttgctttgctttttaataaaaacttgctgcacttactaaatttgatacagatttggggtcaattttttttctgactttatatcaggttttataataaaagtcaggggaaatgtaagagtcatttaacaaactgtcttaatagtgaactcctagcatacatttatgcaggtaaagaaggtatcattatggtaccaattttgttattacttctacctgaatgcctatggagcaatacattagtgcgaagcaagataattaaagtgagtattgaaaaccataaatttatttctgcctagctctaggtgagctgcagcaaagaccaactaaaaaaaggtactaagcactgacatcagcaaagcagtgtgaaaaaattgctcaataactattgcttttatgcctgtgctttgagatgcacttaaggacactctaatttttttcacaacaccattcttactcacatttatattttgtttttcagtgagaagacgtgagctatattttgaatcaggtggctctgagattacagctttggttttgtgttttcctctagctgctaggggagctgatcctggaccgtcacaactttgccatcatgacaaagtatatcagcaagccggagaacctgaaactcatgatgaacctccttcgggataaaagtcccaacatccagtttgaagcctttcatgtttttaaggtaaaaagtacaagctctggaaacaatgttgtaggcaattttttttccagttccaaatggcaaactccctgctctttactctccttcatacttgaaagaaaatgaaataggcagtctttgtgttttgcatgatttagatgaaatttcagagttatcttaatgaatgcccattcataaaggtttgctgactaatccatacatctaaatatttttattttttcacggagaaaatgcatgatactctttcccaaaacttctaaaacaatcagtgattgagctagatcccaaaccctgagtgtcggccttgaatgctttgcttcctacaagcactgtctcttcgaactttaaatgacgccctgaagacacagtcgggtactactcacattattaatattattatttttttacaatgtattttgttatgatagaaaagtaacccctttagacaatagtggtttttttgttttttgttttttgttttgagatggagtctcactctgttgcccaggctggagtgcagtggtgcgatctcggctcactgcaacctctgcctcccaggttaaagcgattctcctccctcaacctcctgagtagctgggactgcaggtgtgtgccaccactcctggctaattttttttttatttttagtaaaagcgattttcaccgtgttagccagggtggtcttgatctcctgacctcgtgatccgccctcctcggcctcccaaagagctgggattacaggcatgagccactgtgcctggccctacaatagatttttttaacaggtggggtaggtgggagaattctatttgtaattctgtattcccagcctaactattgtaaatagtttagtacattttatttttcagtgcacacattccagagttttttctacagctgtattcacagtgtaccaacaactgatatcctaattttattacttaatgctataccataagtaaccattttcattattgctataaatagtttttagagccagtatatttctcaccatcatagtgtatcattgggtatatttcttctagtttaatagtcctatgtcattgatatttaggttactttcattttttcctactctaagtaatgctacaatgtgcattttatgcatccagctaatttttttaatatttaagattcttatcttctgatagatacctagagtggaaataagcattcagagagttccagatttttttggttcttttttctaataaataaaaaataaataataaatttataataaataaaaaaataaatatttttctaaataaaaaataaattttatttattttttaaattcagagacagggtctcgctctgttgcccaggctagagtgcagtggtgtgatcatggcttactgcagcctcaaattcctaggctcaagcaattctcccacctcagccttctaagtagctgggactatagacacgtgccacctcgcccagctaagttttttattttttgaagaaacagggtcttgctgtgttgcccaggctggtctcaaaatcttaggctcaagtgatcttcctgcctcagcctctaagtgctgggattgtaaatgaacacaagttggattgctcaccacacgcagagtccagttaacaagaggcaggtctggtaaaaagaaagttactttattagccaaaagtaataataggaaagtggccagattcccatccaacgcaactactttgaattttaggggcaaggcaaggttttaaaaagagaaaacatgatatggaaggcatgtaaaaattatgctgagtacagtgtctgtatttcttgttctggtagctgtcttgggtcccagtccaggtggaaagcaggctggcatcgtctcaacgatggctgggttgttgactagccaccttgaggttatctctggaattttgcagctgggtctccaagcttggtctgtctgactcaagattcacgtttagcccctggaacttctaagtaggcagataattagataccagcatgcagttagataaatgtgaagggagtatagacagtgagaaaggggtgggtcgtggagtctattttaagactaagggaaaacacttctgcagtttgcttcaaggttacatttttaaacccaagagaaaggggaaaaatgttttaaatgcactttgaagttaagctgcctagttacaggattataggtgtgaaccatggcacctgatctcagtttttataaagaatgtttagtgatagaatttgtaagtccataaatgggaggcatggcagtttataaggtaattgttgctttgaaaagtaagacatttttagttgatctttcagccaccagatatttattacatcattatatatatatatatatatatatatatatatatatatatatatatatatatatttttttttttaattgaagagatatgtaggacaaggtatggggaaaggggcatggagcttccatgccttccctgagcagccacccctcaggagtctccatgtgttcggctctctggaagctccagcccagatatttattgtccagaagcccattagagcagttaaaatcctcaactaatttataaattttattcagttccattcaaaatcccaactggactttccctggaacttgacaagctgattctaaaatttgtgtggtagagcaatagcctaggattatctatggcaattttgaagaaggaagtaatcttctctaccagatattaagacttgttatggatttagagtaaatgaaaacagcattgtattgccttagaagctgataaatagaacagcaaaacagagtagagggcccagaaataaacctatataaatccgaaacttgatatttgatcatggagggattataaaccagtgaagaaagggttaaatattcaataaatgtttcttggataatgggttgtctgtgtagagaatcttaccctgcagtatacacagaaataagttctagataaagatctgcactagaaaagcaattttttttaacttttagaagagaaaataagaggctgtctatataatattggggtaggaagaattcctttaaaaagaaataaaaagtcacaaaacataatagaaatttttcttgagacagggtctcactatgttgcccaggctggagtgcagtagtgtgatcatggcttactgcagccctgacctctcggcctcaagcagttctcctgcctcagcctcctgagtagctgggattgtaggcctgcccttaccatgcccaactaattctatttttattatttgcagtgatgaggtctcgctgttttacctaggctggtctcaaactcctgggctcaagtgatcctcctgccttggcctctattatggctgggtatgaaccaccatacccagccataatagaaaatatttaaaaatgtgaccacactaaaattttaaacttctgttcaaaaaagaaatcataaactgaaaagacaggatagaatgtgacatatataactgacaagtctttaagaaaaagacaaataacagaaaaattggtaaaagatacaagttggtagtttacagatgaggaaacctgattggccaataaataggtgttcttcttacttgtaattgtggaaatggccattaaaatatcaatgagataccactttatgttcttcatattggcgaaaatgtccaaccatatcagatttttgtaggattggacagcagtgggagctgtcatacactgtgtaaattggtgtaatcactttggagaacagtttagcaaaataaactcttgaagctgtggatacccttcaactctgaaatccatttctaagcagtttcttagagacactcttggatgtgtgcataaggggttatgtacagtaaatcctctcttaaagtcgttgataggtgcttggaagcagactttaaacaaaaccatgtacattacagcaagtcctcgaataaccatgttttgttgtaaatttgatggaaaaattgtttgccttatctgttgttttgcttaaagttacaatttctaagaagttatccaccttaaataaggacttactgtgcaaagatgtttattgcaacattgtttaaaatgggaaaagccatacatgggcaccagtgggagactgggaaaataaattgtgctacacaaatacaatagcacataataatgggttaaaataaatagagttatgtggatcgctttgcctaatcttagaaacattttgttgagtggaatgaccaaatatttaaatatgtcatttatttaaagtttgaaaacatgcaaaagaacactaagtgtggattcatatatatgcagttagagtccaaaaacatgcatggaatccgggcatggtggctcatgcccgtaatcccagaactctgggaggcggaggtgggtggatcacttgaggccaggagtttgagaccagcctggccaacatggcaaaacccagtccctactaaaaacacaaaaattagccaggtgtggtggtgcatgcctgtagtcccagatactcagtgggctagggcaggattgtcacttgaacctgggaagcagaggttgcagtaagccgatattgtgccactgcactccagcctgggtgactgagcgagactctgtctcaaaaaaacaaacaaaattgcaaaatgcatgggaatgccaaatgccaaattcaggataatggtcatctcaggagaagaagtagggaagagaataagcgatatcatacaggagtgtccaatagccttcaactatatctgtaatattttattaaaaaaaaaatctgaaggcaagtatggcaaaagatattagattttgatagagccaatggtgggaatatgaagtctgatatgttactcttgtactcttccatgtgttagaattatttcataaaaagtttcaaaaaaaagaatgaaacaaaaatagagtgctgtaggcctggaaaatgcctacacattataaaatgataggccctctcaagacccttggaccgaaggaattgtagaaggctgtgtatcatatcattcagctcccacagaactttaaatgagaataaacttcatataattttgttcaaaaatgcagtattatatatagaaggaaacagtgggttgcaaaataaaaataacctatttccatcctctgagaagatcagaatttgggtcacctaatcattggacagggtaggtacatttaaaaatagttgaccgcttgtttacttgtatgtgtgtaacttggcctgccccgtaccccggctatgttccttccactgaagtatgaactacattgtttacttgccaaaaatattttgttatttagaaaaaagtaacagctaagtcctaggattgttttcacatcgtttaattaataggtttttttccccagagcaccttccgtagggtgcaaagaatgtggaacccagtcctgaaaatgtctttgctggattgttaatggctgactctcattagcctgctaataggctcagcacgtgcttcctactattggtgagcaggatagtgtggtgggaaagccccgatggaggtcaagagagcaaggtctttgttctgtctcagttgccagcagccactttgggcaaatccacctggatgcattttttcacttgcaaaatgaaagtgctgaagtgtaattctaagatactaggtcaggagacttttgtctctggtcctgactctcccagagatgtgcccaatatggattgagggatacattatgagatgatcttctccctttcctttccctgttaaccttgatagcaaagggccgtgttgccccttcccaccaaaccatgtaaggtgtaagaaaatggtctgtgtcgtttgctcgctcagagctgctggaactcaggcatggccagtgccaaatatggcactagtctgtcactcagatcctagcatttggctataatagctattcccttcaaaacaagaagttctgtccccagcttattccagaatataaaagtcggcttgacagttcagccaaaaaagtatgtagaacaagaatgagaatagtttccgtgtggtcttactgaaaataagcaaaattacagatgaatttagtgaaggactaaccgtgaattactcacttccttaaggacccactttttaatattatttatttatgtatttatttttgagatggaatttcactcttgttgcccaggctggagtgcagtggcatgatctcggctcaccgcaccctccacctcccaggttcaagtgattctcctgtctcagcctcccgagtagctggtattacaggcatgtgccaccacacccagctaatttttgtatttttagtacagatgaggttttgccatgttggcccggctggtctcaaactcccgacctcaggtgatccgcccgtctcagcctcccaaagtgctgggattacaggcgtgagccaccactcccggcctaaggacccactttctagcacaccaaactactatggtcatggtgtaccaaatctaaccgtactcatggagaaagcaattgagaccaagtgaatttaggaattggctatgaactagtttaataatgataatttcccctaaaattgtaacagcatattgaaaagtataccaacttctgacttaatgtctcaccaactgcttttaaatggtgtcgaacattcagctttatcgtgtcctcatttgatcttattttacccttttgcatatttaacaaagaagccaaggagaaaatgtggaaagtcataattaaggcctcacttctcctttctatttttaaaaagactttctttaaaaattcataaaacaatcaactctatgtttctttatagaaaggtttgcaatgggtatttctggcaaactttagcaacatcatcaaacaagtatataaatatgttacttacggctctgtttgataatcctgctactgaatgtttataatgttgttacctactttacaaaatatttttgcagtagtatataaagaaaatgcagcctatacttaatgtttgtgaatattacctagcataaaaaaatttaagttgcttttccatgtaattttgggatacatgtctagtttcctatgtaacttccacaattatatgaaatttgtagatcccaaagatttgatttccaaaataccaaagcaattgcattaacaataatgttagtaacattttaacattttgtagcgtacagaacactttccctgacaaaattccatgtgatcctcaccccatctgtgaagtcaggcagatgtggtgtccgtttcattggcgaggaaactgtctgagagattaagtgacaagcctgagctctcacagacaaggccatcttctgcttccaaatcccatgttctttcttctacatagccccacttatatgtggggaactgaggctggtaaattcgaaatggcaaagtgcctctttgccagacctttgtatttcgtagaagcgctttgcgagcaggaattttcctctgatttgttctttctctgctctatctcctaacaactagaagggtttttggcacatagtggctatttaaatatttaattaatgtctgagtaagtaaattaatatgtatgttctttttttagaattatttttatttttatttatttattttttatttgagacagagtctcgctctgtcacccaggcttgagtgcagtggtgtgatctcggctcactgcaacctttgcctcccaggttcaagtgattcttctgcctcagcctcccaagtagctgggattacaggcacccaccaccacacctggctaattttttttttgtatttttagtagagatggggtttcaccaagttggccaacctgttctcaaactcctgacctcaagtgatctgcctccctcggcctcccaaagtgctgggattacagacatgagccaccgcacccagccaatatgtatgttcttaaaggaaggaaactgagagcctctgtgcctctgaaccagataaggattgccagataaaatacaagatgccccattcaatttgaatttgagatggccaaagtatagcactgcacggaacatactaacattaaaaaaattactcattgttcatctgaaacagaatttaatggggcatcctctctttctgtttactaaatctggtaatgctaacctggagggactcatttcagttttcaaatattgggacaagaacagagtcctgggtagtaatatagtatcttttaaaaaaatctttctgacaaaatgtttgacaagcatcgtcatgttaaatagaactattctgacttgtgaatatatttagatccttccttcctggcatattccattcagaaagcgagaatgtgtaggtctggaatctatgttttgtgcaggcggcttcccctgggaagtcctggtccacatttccatctgaggcttggagaatgaggtcagcagcgtgtgtgctcatcacattcgccagaccttccgatggagctgaaggcctccgggaagaataaggattctgaatggctgtagtatttgtccattgtagatgaaaccaggaataagtggctaaaagctcagtgatgaaaagtacagtatcacagacctgggaaggaaataaaatcattgagaaagtgatggcacaaagagcagaaaagtccagggtgagcaagtgatagcagagtgaaggcccctgatgcacaaagccagtgttctcttcaactcgagtcagatttcaccgggatgaagtttatattgacagctctgggaatcttgaggttggccatgtcatcaggtaaatgacttctccttaaggatcctaggaaaggagactgcacagttcctctgaggtgcttacctggaggagggtatagagaatacagagaggctcagcagagagaagccacagaaatgattgagctatttggaaaacaagacctatgtggaaagatttaaaaacacttatgcaccaaaaaagaagactgacagagaaatttaacagtggtacttgagggcagagcacatgtttcatagaatatcataatgcaagccaacagcagctatctcaataggctgcggagagtgactataaataaaaccaattttctgagaacgggagttgtagacactggaataggtcattgaggatggttatagaatcaccttttcaggggatctaataggaatcaattcttgtttgccaagaattaccagtgggttgtgtctgaagtggaaggatgaattagctaagttcctgaggtccctcccagttacaagagtctattctttctacaattgactgtgataaagtatattagaagtatgaattcctctttttacagtattactagaggaaatactagtatactcattctttggatggaagataaaatattttacccaaaatagttaaaatgagctattgggtttaaatatgaatcttaataacttgcatctgcataacagtaaatatttgggaaagcgattactgctgtatgtgacactgcagtgatttcacgttgaaggaagtagcaactgtaatgagcagtcgctgcgggccagaaactctgctaaacactttataaggacatactcattgaatactttcaaaacccaatccaattttggccacaaaaaggatgtggcattcgtaacatgctacaacatggattaaccttaaaaacattgtgctacgtgaaagaagctagtcatagaaaccacgtattttattagtccatttatatgaatgtctagaatacggcaaagctctaggggcagaaagtagattagtgttgcctagagctgggagcatgttggggtgcggagggggcgggcgactgctaatgggtatagggtttctttttgggatgataaaaatgttctaaaattgattctggtgatgattgcacaactatgtgaatatactgtaaaacattaaaaagtatactttaaatgagtcaactatatagtctgaattttaataaagctgtttttaagaaaaactttttaaaaactccgtgagatataggtaatcactatgctatattccttttacaaaactgcctacaggcttgaattgttcagttcaaatcaacgtgttctgttactctaaggaagtgtccagacatccaccttgcatttagctgtctaaaggcaacattaaaatgctgaaaaaactttggaaagaaggcgttcccatttctttgatccactagtttacttaacagttttaaagatgagaaacgtgattatagcttgaccccaagccccttttcccctccttgcccctacctttagataagtagttaagaacatttgaacgaaatagtcggtcactgccacacatggagagggcgaagctggcagccatactgtcgtgtagtcactagcggaagcacccagcacagcccggaaggcgcacgctgcacacacagcctagtggtcagggatgctgctttaacttctctcagcttcacctggagattggggaaaaattgtatcttcctcccagagccgttgtcaagataaaagaatacaattcgtataaactgtttagcacaatgcccagtgcatagcaaggattcagcagatgatatctatctttttgaaatggcgatcatctcatgtaatgtaagaagaatctacaagcattaaaaaacatattgttaaggaaaaagtagtttacaaagtactatgtacagaatgcaagcccagttttgtttaaaatatttctacaaatagtgacgtgcacaagaaaaaaatgctgcacatacatacaccagatattcacaggggttatctctgggtggaggaattatgtcagtgatttttttactttcttctttgtgcttttctttatttcactagttttccacatgtatcacttgtgtaatcagagtgatggtaagaatggtggcagtgaggaggaggatttcaggagattctagaggtttttagagcatcctgtactttcaggctgctggcctccaccaccctcacttccttcctggggcttttcttcctcccttgatgtgcagtggggtccagtctaattctgtcgtgggcccagtgatgcttatagacacccaaccagcttgcagatttaacaatcaagtcctttcttaaacaggaaaaagttaattgtctctgatcagtactagcaagtattgtgtcaaaatattctaaattattactcagatgtgtagtcatatgaataaggacatggttgccttatttgacacttcgatggggtgggattttgcttggagtagcttccacataaccgtaacaggagcatatacagagcattccaggcttgcagcacgcatcaaaggcagtgaggtcagcaacgcagaagactaacctccccataccttgtctggctcaatccctgttggcaaaatagaatttgaatgaaattaatggatatgtgtgtaagatgtagatattttattttccatgaaatgcattcagttttaaaatggagagtgcaatattttcagtcttctaaactaaaaatatttgagttgtggtcatgatatttgccttcctctcaccacgcctgagaactccacagatcacatctctcaggcatgttatgtaaactgagggatacaggcaataaggcggcattctaaaaggagaagtcctgggtagtttcatttgtttgggggtggtttgaaaattacattttttaaaaaacagggacaacaaagacaaccaaaaaaatttctaccctggacataatattcaaaagacttgcttccatataccttgaattagaagtgtgtttcttatcatcagtgtgttaatctcaggccttgaccagtgtcctggctgccccaagggaatcatgcactattgcattagctgactccagtcagcaactacttttagaggcggcagagttcagaagccataaaaaataaaaacaagaaaaaatttaaaacctgggcacaaacttagcattttccttaggtttatggtacagtgaatgaattcagtggaattgaaccagtgatgcctgtctgcaaattccagtacattttacatttattttggtttgcaacatcagtttgtctattattttggtttgcaacatcagtttgtctattatagttaatctttttttttttttttttaagaaagaaagactgtcatgagttatttatgtagtcaccacaaaatgccaggcaatttttagctaaaacttcacagcaactcccttgtaaacaaatggtaaccagagcagccacacatttctgataggtattacataaacatcaggcagtttgtataaacaggcctggagtcccttttttttttttttaatataagtaacaattttagtttattgtggtaaaattcacataacataaaattcagcattaaccattttaaagtgtacaattcagtaacagttagtgtatttacgatgttgtacaactgtcaccaatatctagttccagaacatttcatcatcccaaaaggaaaccctgtactcagtaagcagtcattccccattgcccctcacctccatcccctggcgatcattagtctgctttctggctccatggatctgcctattccagatattttatataaatagaatcatacagtgtgtggccttttgtgtggtgttttgttcatacactgttttcaaggttcatccatgttgtagcatgatccatcagcacgtcattctttttttattttgttttaatttttttgagacagggtctcgctgtgtcaccaggctggagtacagtggcacgatctcggctcactgcaacctctacctcccaggttcaagggattcttctgcctcagcctcccgagtagctgggattacaggcatctgccaccacacccagccaatttttgtatttttagtagagacaaggtttcactatgttggctaggctggtcatgaacccctgacctcaagtgatccacctgccttggcctctgggattacaggtgtaagccactgcacccggcccggtacttcattcttttaaatggccaaataatattccattgcatgggtataccacaaatttgtttatccattcatcagttaagggacatttgggttgtttgcaccttttggctattgtaaatagtgctgctatgaacactactacacaagtttttgtttgaacaatgtattccatttttaggaaaggagttgctcggtaatatggtaattcattgttgaacttactgaggaacagccaattttccacagaggctgtgtcattttatattcccaccagcaacaatttcttttctttctttcctttcctttcctttcctttcctttccttccctttccctttccctttccctttccctttccctttccctttccctttccctttccctttccctttccctttccctttccctttccctttccctttccctttccctttccctttccctttccctttccctttccctttccctttccctttccctttccctttcctttcctttcctttcctttcctttttttgacacagtcttgctctgttacccgggctggaatcacagctcactgcagcctcaacttctcgggctcaagcaatcctgctgcatcagcctcctgagcagctggaactacaatgtgcaccacaatgcccaactaatattttaattttttgtggagacagggtcttgctgtgttgctcaggctggtcttgaacttgaactcctgggctcaagtgatcctcccaccttagcctccccaagtgttgggattacaggcatgagccatcattcctggcccagggtttcaatttatctccatccatctttgcaacacttgttactgtcagagttttttgtttttgtttttttgttttgttttgtttttgcagtcatcctagtgggtgcgaagtggtatctcattgtgattttgacttgcatttccataatgactagtgattttgaggattttaaaaatgtgcttattggccatttgtatatcttttttggagaaatgtctgttcaagttcttttcccctttttggaatgggttttctgttgttgttgttaagttgtaagagttctttatatatcctggatacaagacactgatcagatatatgatttgcaaatattttctcccgttctgtgtgtttttttcactctcttgatagtatcctttgatatacaaaagttttcaatttggttcagtttacctgttttttctttcattgcttgtatttttggtgtcatatctaagaaaccattgccaaatccaacattatgaaaatttaccctgtattttcctgtgaaaattttagctcttatatttaggtctttgattgattttactttttatttagagtaagataagggctcagcttcgtcttttgcatgtgaatatccaaatgtcctatattgagtgttttttgtttgtttgtttgttttttgagacagcatctcactctgttgcccaggtgggagtgtggtggcaccatcacagctcaccgcatcctcaacctcccaggctcaattgatcctcccacctcagcttcccgagtagctgggactacaggtgtgcactacggcacctggctaatttttatattttttgtagagagggggtttcgccatgttccccaggctggtcttgaatatctgggctcaagcgattcgcccacctcggcctcccaaagtgctgggtttagaggtgtgagccactgcacccagcctccgtgttgagtgtttttatcatgaaaaggtgttggattttatcaaactctttttctgtatcaattgagaagatcatgtggtttccctatattctgctaatgcggtacacttgtgttagttttctaggctgccataacaaagtaccacagacagaatggcttaaaacaacagaaaacacagttctggaggccagaagtccaaaatcaaggtgttggcagcattgacttcttttggagactctcagggagaatcttccttgcttctctcccagcttctggtggttgccagaggtccttggtgctccttggcttatagaagcatctctgtttccatcttcacatggcgttctcctctatatccctaagcgtctctgtgtccagagttcaccagtcattggagtaaagccaccctaagccagtattgacctcatcttatcttgagtacatctgtaaagaaagtctgtgtttccaaataaaatcacgctcacagatactgagaattaggacttgaacatatctttttggggaacacagtttaacccagtacatgtgatgtgttacattgattgatttgcttatgttgaaccacccttgtatttctggggaataaatcccacttggtcatggtatagaatccttttgatatagtgatggacttggttttctagtattttgttgaggattttttgcatttttattcatagagaatactggtatgtagtttttttgtgttgtttttctctggctttggtatttgggtaatactggcctcatatcataagttaggaagtgttcccatttcttacagttttcagaagaatttgagagagatttgtgttaattcttctttaaatgttaggtagaatttactagtgaagccatctggtcctggtctcttttttgttggaagttactgatttgatctcttgtcagaggtctgcagattctctgtttcttcttgagtcagttgggtagtctgcatgtttctaggaatttggccatgtcatcatctaggttatctaattttttagtatataattgttcatagcatctctcataatccccttttatttctataaggccattagtaatgtttagcatttgagtcttctttcttttcttagtcaatctagctaaaggtttatcaattttattaatttttttcaaagaaccaacttttgggttcattgattctgtcattttcctgttctccgttttgtttatctctgctctaagttttattctttccttccttatgttgctttggtttagtttgttcttctcttcctagttccttaagctataaaactaggttactaatctgagatctttcttttcttttcttttctttttttttttttttgagatggagacttgctctgttgcccaggctggagtgccgtggcacgatcttggctcactgcaacctccgccttctgggttcaagccattctcctgcctcagcttcctgaatagctgggattacaggcgcacaccaccatgcccggctaatttttgtatttttagtagacagagggtttcaccatgttggtcaggctggtctcaaactcctgacttcatgatccgcccgccttggcctcccacgctgctggattacagacgtgagccaccgtacccagtccagatctttcttttttaatgtaggcatttatagctataaatttccccctgagcactgcttttggtgcatcttatgagttttgatatattttgtttttgttttcatttgtctcaaagtgttttctaattttctttgtgatttctatttcccattggttgtttcagaggagcctaggatactttataacccagaaggtcaaaggtcagttcctccttgtcaccccatggctgtagacccaccaagcagaagcttaggaaacccttttccttctctgttatgggtcccctggcctggctgagcggtgggctcactgtaagtaagccatgtgggctgccaagagactgtctcatcatgagccactcgtgaccacagggacgtgcagtgttcccagagagggttctgtattccttagcacttgctgtgtgagtgagtccatgacctttgatggaaagaacagaaacatgaagaatttatatatcatatttatgaacaatttcagaactaaattggccaaatgaactgagtatcagatttgtgggctttgatttctagttctgaacctcacctggtaaaatgtcacatctcatcagttctcagaacaagcatcctgggattaatctcagcttcagcccttgctagttctgtgagcctggcaaaagcaattttgcaacaatgtatgtgttctactccatgcatttgaatggtgcatgctgtgtgccatgtaccatttgaatgcatggagtagaatacatatactgttctcattaagcctcacagttacctaatggcactcaggtactgttatcatccccatttttcagatgaagaaactgaggtacagagaggtaaacaagttttgtgaaatcataaagctaataagagatggtgctaggatttgggcccaggctgtgtgcttctgaatctgcgctgttaaccatactactatgtggtcaagtttattaatatgactcagcctgtttccttattaacagatgaggataacagctcttatacttcagggctgttgtgagggttaagtgttcgatgagtgtgaaacacttagccccatgaatgaagacaaccagctgggagggctatgaactggctgcccacggtcgtgtgtacagttgaccagaattagggtgatggggcagtgacgaggccttgaattcagttcaggcactttgcctccagcaagcacgactccccacatacagtgacaacagaaggctttcaggagacttacttgtgctgaagctgctgatgttctccagcacattctccccacccagacaggcagaggtccttttatttctagataacaaaactttgctggtggacacactgctaacatgtaggagaggtggaatttgaacccaggttccagagccggcgccgccttagctcccacgttcccttactcattcttactgttgctcccacgtcctgtcccgcccacctcagagcctgcagtgggacaattcagtattcctggaatgctgcttttcttaccaccacgtgtaaacattctctgcctgactcatggactagctctcatgccgcccacaccatgagccttcctgttccaaacccggaaatgtaatgtcatcgccacctcctgggatgggagcctctgcagtcttgtattctccacattggtactcaacatcctagggtagttttctccttccccacacttgctagggtggaggaaccttaaaggcttagccatgaaacccccactgccccataactaagccctttcatagtgtgttccctgtagagttgggcactgcacagctatgggacagggatgggtgggcagagggggtgccaggcagaggcaggaggccagaccatcacaccagagagctctgtagggctcagagacactttgatctgcattctggtcatgtggtcatgtatgtagcagtaactaaggagtgtgtcttttacaaaatagtgcaccagtcagtatcagatcgtggtttccaccaggagttcacataagaatctctgtggaacttcatagaaatacagaatgctagacatccaccacagacctgctgagttgacgtatctgggaggtaggacctgggcagttgtaatttttttttttttttttgagacggagtctcactctgttgcccaggctagagtgcagtggcgcgatctcagctcactgcaagcttcgcctcctgggttcacgccattctcctgccacagcctcccgagtagctgggactacaggcgcccgccaccacgcctggctaattttttgtatttttagtagagatgggatttcaccgtgttagccaggatggtctcgatctcctgacttcgtgatccgcccacctcggcctcccaaagtactaggattacaggcatgagccaccgcgcctggcccagcagttgtaatttttaaagcttcacatatgtaacaaacagtgacattggtgacctccagggagggaaggtgagaggaggactattcacgtttgtcctttttgaattttgaactaggtgatgatattatgtgttcaaaaaataaattatgtttaaaaatcataagctctttcatactatatgttgtttatgtttaaatatctatgtaataggaggataaggattgaaatgtgcccagagatggtggcacactgctggaggtgggaggggaaaggtggaaggtgagggtttggttccatttgtaatgttttatttgtttaaaaagagactcttgaggcacaatggtaaaatctattcaatttgtgaggtacgtatactggatttgttatgttattttctgtttgaaagattttatagttaagaacaaatatttaaaagtaaaacaaagtcaaatatgaaatgttcatagatagctcccacgtgctcctagctagtgacttaggagagtgataggaaaggtgaagtgcaggcctgtggcgcttaacagcagggagttgttctgagaaacatgctcactaggcgatgtcctttgtgtgggaacatcacagagtgcatttacgcagacctaggtggtggagcctgccacacacctaggctatatagtgtgggctattgcgcctagagcacaaacctgtgcagcatgttaccatactgaatactgcaggcaattataacccaatggtatttgggtatctaaacatagaaaagatacagtaacaagatggcataaaagagaaaaaatggtacacctgtatagggaacttaccataaatggagcttacaggactggcagttgctctgggggagtcagggattgaatggtgagtgaatgcgaaggcctaggacattaccgtacactactgtagacttcataaacactgcttagactacactaaattgatttaaaaaattttttttcttgttttaataataagttaaccttagggccaggcatggtggctcatgcctgtaatcccacagctttgggaggccaaggtggaaggattgtttgaaaccaggaattcgagaccagccttggcagtcatagtcaggcctgcctctacgaaaaactttttaaattagccaggtgcagtggcatgcacttgtagtcctagccactggggaagctgaggcgggaggatcgcttgagcccaggagttccagtctgcagtgagctctgatagtgccactgcacgtcagcctgggtgacagagcgagaccctgtctcaaaaataaataaatacatacataaaaataaccttagcttactgtaactttttacttttataaaaagtttattttttaattttttaaaacttttttactcttttgcaataacacagcttaaaacaaacacattatacagctgtacaaaaacattttctttctttatatccttattctataagctttttctgtgcttaaagttttttattttttactttttaaacttctttgttaaaaactaagacataaacactcacattagcctcggcctacacagggtcaggatcatcagtatcactgcttccacctccacatcttgtccccctggaaagtctgcaggggccataacacccatggaggtgtcacctcctacgataacagtgccttcttctggatacctcctgagggacctgcctgaggctgttttacagttaactttttgtttactaagtagaaggcatatactctaaaataatgattagacgtatagtatagtaaatacgtaaaccagtaccatcgtcgttgattatcaagtattatgcactgtgcataattgtacgggcttgaattttatgcagctggccgggcagtaggtttgtttacaccagcatcaccacagacacatgagtaaatgcactgacctacgatatcacaaggcaatgggaatttttcagctccattatggtgctatgggattacagtcgtatacatggtctgttgttgactgaaatgtcgttatgtggtgtgtgactgtattgatcaccctcactgagaattagagtcaggggcttctacgcattaataatatcagtcacgcatgaaacgcgagtagtgtgggtgaggtccctggcctgcactgctgtagcgtgggtgaggtccctggcttgcactcctaagtatttgtttctttttgtttcaggtgtttgtggccagtcctcacaaaacacagcctattgtggagatcctgttaaaaaatcagcccaaactcattgagtttctgagcagcttccaaaaagaaaggacggatgatgagcagttcgctgacgagaagaactacttgattaaacagatccgagacttgaagaaaacggccccttgaagagctccccggcccctgtcacagtcagtcgtctcatttgtccagtttgtacagtgtgtcatttcagaaagtcatcattcttgggaagactttggaggtgcctattttttctgctgtaattgttctgggtagatggagtataaacatttgaatggaaaaaaattaacctagaataatatattcattttagtcaagtctgtgattatttatgtgaaatgagaaccattgtatcagatgttgataaaagcaattttaacttgcagatgtgagcccctgggcacaatgagccgctaaatgggagctcaattgacaggcatcaccaagtcttcaaggaggactgagttctcaggggagaactgggaatggggccagggtgcaaaaatgctttgcccatctgtaggtagacacacagatcgctcagggcactgagagatcccagaaggtaacgttaatgttttcagtcattgtgtgtcctttgttgctgccaatgtctttggactgtaatcagtgcatccacacctcccaggatccagtgctccctctcagctcagtctcccctctctccctgtcctgcattccatcccagctcctcagcatggcctcagtgggcgcacccatgcctcccgcagtccaggtgagcaggggagcaactgagcaggaagaggatggatcaacaagggtcacggggaataggggacccacggggtgtgacctgcttgctagagaactgtgaacatgtggctctggatagagtgactgctgctccatattagcttccagagggtgagtgagggacagaatatttccttcataatggtcatgggtgaatgctttctgctgtaagtgtcttttagagtaggaatcagcatagtgggatgcccagcaggcacaaaccatgggtccagggagtctcagcggggaacttctatcagtatcaataaccattggaaggagaaatgattcatgtgtgaaaaaattctcagatccatcaataaatttttttcagagccattgtatcagatgttgataaaagcaatttttttctaataagctgtcattctataattgcccatcacagtctttagtgaacacatagaaagcctatacagttttggtcctgaatagtctcttgtgactaggatgattgaggtgttaattcctcttccttataaaaaggcttggaatcaaaaatattttaaaaggccgtggtttcgtttcagacatcaaccatctaaaacgggattttaaagcgatattttacaagaatgaaaggcacaattgttgatctgtattttttacacttcagtttctaaatcatgaatcgttgccttccacaggaaccctcccttatacattacttgagtgttgtgtagtttttcttcagccaggtatttctctgcctagagaggggaagagaaatgtgttctccaggactgatcccctttgtagattttgtacctgaagagttacctggcagggcaccacccttggctaggcccaggtgtgtgtttctttcttgcctggcatggaccccgaggcaggtgatgtggggcctggcgcacctccccgctttggcagctgtggcctccctggccagtgcccttgcaggaggccggccggcagcctgatgacccgtactctttagtcactgacgtcagattatttttataacgttccctgacagttcagagtcccttcgaattgcacttttctggtttcgcttatttaattaaaagagatgagtgtaagtataaaaaatgaaggtgaaataaccattggaattgtatttggttacttaatactgttccacaacatcttgggacgtctgttttcctttggagagtgaggccttgttattattcttttctgataaagaaaacattttatttcctttgggcttgcattagctctttcctagcaacccattatcccagctcagtacctttcaaacagaaaactagagtctggggttttgttgtgatctgaatttgtaagttattaatgtgaaagggggagcaggaagctccccctttgcacaaagggggatttgtttgcacaaagttcactgtaaatactgtgagaattgaattctgaaaaggtcatatttagtgatttcaaaagcacacatttaaatgaagactgactaaataaaaggtaccacaca

SEQ ID NO: 298 - DNA, 64677 bp, Homo sapiens
acttcaaagggcaaaagaaagaggagaacctccgcttaccacagccgggtagaaatgcctgaggaaagcagcggagctgaccgtgccagcatttacacagggaacacttcttgggcagccaggtgtcatggggcacagacccacagttcctgagaatgaacaggtaaggcgatagccttgggtctgaaatttccacttccctttctctctcctctccacggctccccgcccctctgaattgcttactctttgcgcacatcgtgctcacagttccgtccgtagaaggagggagggcaggcacaaaaggaccccagcatgcaggttcccccattcaggcagcaggttctgtttagctccttacctgaaaggtaagaacagatgactgagggtgtagggatggaaaagtgcaagggcaattcctgtaagcgaaggttaatacaacaccaatgtgttgtatcagagtaagtctctgtgcctttgagcagagaagtcattttcatgcataggccagtggtggttctgggttccccagtgtgaagtggactcaggggaggaaaactgcactctagggaagtaaaatacacaatccttgtctcacttccaaaaccaaaagcagtccagcacctgcacagttccagaaccaggtgcccttttaggtgaaagagtgttggaaagatactcaggagacacatgaagggccagggcagaagcatcgaagtcaggcagttcttactgtgctgtatccccatgggcggcacacgctgggaagaccgaggccgaattgcaggctcctcctggggccaaatgctgtcatctctgaaggccaggtatccccgagatggacgagcaaattcctgatggcccagcccttaacgacaaaatcaattcatggagtctgtattttaggccacataaaaattgagagtgatcaaaagaacaaaaggtctctcaccggcaactaatcccagttcaaagactttagaaatggccatgatccaaatcacactaggaagaggaagtcagacatgagttagccaaacaaaggaaataaaaccttacaagttaacacccaggtcctctcatcacaaggacaagaccacagatcactgaaaagaaattgtagagcaccatctttctttttttaatggctaattcatgtaacaaagaaaaatgttgaaaaaaagtcaccaatatccaagtctttttaatatatattattatttcttaggccctgtcctcacataagtacctaattttaagtaggtatatgtcttttatcttctatttcacatgttttcccctgcatacaattttcatataaggattaaaaaatagctgcatcccatgttaccgatgaatcattttacaaactactgtatttatttatttatttttgagagggagtttcggtttttcacccaggctggagtgcaatggtgcgatctcggctcactgcctcccctccccagttcaagcaattctcctgcctcagcctccagagtagctgggattacaggtgcccgccaccatgcttggctaatttttgtatttttaatagagacggggttttgccatgttggccaggctggtctcctgacctcaggtgatccacccgcctctgcctcccaaagtgctaggattacaggcgtgagccaccgcacccggccaaactattttaaccaatcacttaaaaggtttttaggtaaaaaatgtgggtttttttttttttttttgctattatcttaatagttttgccaagtattgaatctgcttatacctttaatcttttcggaagattttaaatttggttgtagtactgacctttatttgtacaagaataaagaaacactatttcataggcagagtcattaacataaaatgaaaattaacattaacacgaaaatgttaaaagccaatggcaaagttagaagtaaccatgtgaaattccaggtctttcaggaaaaacagcagtgcggttggcagctcttttaaggcttgagcaagagaaaaatcaaatgacaggtgtagaacattacttcctaagctggcaatctctagcaatcaaaaaaagttcacattcaagattagctcatacctgtaagagaagcgggccatcttcctgcagtccatagcttttaacaattagggggaaaagaggcgttagcatcgctttaattcagagtcattgccaaaacagccaaaggaaaacattcatctcctaaagcgaaaatggcaatttaagaagaaaatgagaaattcgttttccccagaaggtcgtagcagaagcaggagcaaggcgtccaggggaaactggagggctttcggccttggacgttttgaccttgagctggagactcagcctttccggggattctccttcttcaacaacaaaccccagtcggggcggggagacctttcaggtgggcgggacgcccaccagcatgacaatggcccacacgcgggaagaggagtcttgtaaaactgtggttaactagccctaatatctctatcattagttgcaggctaaaatgatcagaggtactcttttgggaaaaaaaaagaaaaaagaaaaatcagtttctctaatcaagttggtgattccaggttggaggggtggtggaaagtaattgctttaattaggaaaacctgaaaatgtatgggtctcaaggcattcgatattttattttatttcaggaagttttacttcctgaaatttgcttccacctttgtttttccagaagggtgttttgagccccgtactccccctgggggatacccgggtggccaagaaaggggtgctctccgcctgaggagctaggtgtgtgtgtgtggggaagactaggaagcttgaaactgagatagaagttcagggtcaggaggggttccttgggggctccagacttgaagtgcaaattccaggcggacgtgaattcctgaaaggacgcgggagccggcgccaggtgcccgggagaggggaggggcggccagaggcgcagcagctgggactctccagtgggagtgccggcctgttccaggaaaaagttctagaaccacggcagtccggcatgggaggccatttcagcccccaatcacgggaatttatctcagcctcccagctcccacagggcggcctcttccagcccctcgccgtcctggccccacgacaccgagaattacccccggactctgatgtgccgcttgcaggggtaaacgtgtttattgagtggttccactaagtgccagacgccccagatggagaggcgcgtctatgagccggagtcgcctcacctaacatttcaatcctccgggttatttcatgtgttattaaatacgcccaaagtcgttaatagtttctaaatcgcatttaattccaatttctaaaggaaagcctgacggttacttaatgttgccaggcacacaaatgcgaaacttttattagatagttgtttccatccatctctgtttattggatttaggcctcggcagaaagaattggtagcatctgaggccatttcagcgtcagtgcctacctgtgtgaatgccatggatccacaggtgctgggaagaggtgttatttacttctacacatgattttttttttttttttttttttttttttgcgacagagtctccctctgttacccgggctggagtgcaatggcacgatcttggctcactgcaacctccacctcctgggttcaagtgattctcctgcctcattctcctgcctcaacctcctgagtagctgggattacaggcgcccgccacaacgcccggctaatttttgtattttcagtagagacagggtttcaccatgttggtcagtctggtctcaaattcctgacctcatgatccacccgcctcggcctcccaaagtgctgggattacaggcatgagctaccgcgcccggccttacacatgatcttgggagaagcaaacgtaaaataatttgtattgggggagtgaggccccatccagtcaatggtgggatgcagcaacatttccaactccacagcagttgactatttcattcctgctgcgcttcgcctcctccctgtgtggccttttcaggtgaaatgcttcaggtagcatgctgagattcacaggggacaggggaacatggcctgaagctctaggaggccggaggtgggggagggctccgcaaaggagaaggctagccctggagctgcaaggaggtttaaagatgttactcagtgtggtacatttgtaaggtagcttgtgcaccacagtcctcaccagtccaaggtgctaagtagataagtagcgcccacaatattagtctcactttatggacaagacaactagttctattgggggatttggatgtcttgtctttagagactgggcaggcctgtggcagaactggcaaaagaacacacccctgcgttgctatttccttatctaaagctcttgtggaatttttagagcttaaataggacccctggaaatcactgcattttcagaggaagtaactgaggtctccagtctggcgatgttgtcattgacgggaccagaaccccaggatgccagcttttcagccacacaaaatcccttctctaaggaccagaaccccctgaagagattcccattccccataggtactgactgcagaggaagccaagtggatccagggtattcagagcctgggccaggttttgggatggggggtggggagaaggggaagggaagggctgtggtgtttaagagaggttagatatttgccgttgggctggagatgtaagggctatttaacaggtatttgatgtctactactgggcggcctgtagactggagtttggcgctggagaaacagttgtgagaagtaaccccactgtgaggctggagagaaagaacagtaattgttgattctaattgtactaactgcaaaaagttgttgctgcctccaggtgggggaattgaatggctaccctaggatggccactggtcacctctgcttggtcactgttgaaactgggctgctggccagcctccaggccaatgagtgctttgtgtcaaaaggtcaggcctaggattgggaagtgctgtgcaacgggggttccccaatcacaggcagcccatctcatcccttacaaaaggcactgagagcagaaaatgaaaaacaatgctcttggtgttggccatttcttggtactgcccttgagacattgtgtattaaaaactggggcagaattgtgtttaaaaatcacacaaataagcatttgacttaaaaccatccaaacaagaatggtggaatgaaatacatcataatcaaaggacagacttcctgtgtctgcctaaaattcaaggaagaaaataaacttggagaatgggatcaattttagctatcaaaagccaattcgaccttgtttaaatagttgagaacacgtagaactaaattccaaccaaagagttaacaaaagaatgccatgtctgcactacaatgacagtatttcaaggtaaaagccttcttttatcatagggcacttaggtcttacctctgtcattgttcccttgaacatccaggcaggccagaagataagagagagcagagggggcgggggagttctgtatatgtatgtaccctccagctgaggaatgctggggcctctaatttcatcaagcttagcttctgttaacacctgagctacactcctgcggaagcattatccacccaatgtgtcctggccacacttcattaacaagttaatggctttctgttttcactggcaaacttacaaattgcaactggaaacttactctgtatttgccaaaggtctctgtgtgggacataaaaggacagattcctgcattcaaaaatctgcaatttcagtggggaagacatgctcaagcaagtcattttagagccatattgttacataaatggcgtaagaggaatggagaagggcttaagagaggacttcattttttttccgtgcgccatgggggccgtatcatatttcttcctatgtagacatagtatacattattttatcaatgaatagacatgacatgtttccacgttttgtggtgaacttccttgtacatatatcttggtgaacgcttgagagcatattcctcttgtaaatttctagcactggaattgcttggttaaagggtggatgcttccaaattattttcgaagaagcctgcaccaatctcctctccgcccctcctccctcccccttgagttggtattgagagcttatctcccaagtacttaccaggtctggctgcagcaagcatcttaaattttgttaatacagtatgtgaaaagtagtatttcattgttgcttggttattgggtgtttgtatttcattttctatgacctggctggtccttcttacagagcacttggactggcttctttgagactcagcccaaatttcatttgctctgggaagtccttgctgagaccatcctccctactccagcttccagctgttctgagagccctgtcctggcaaccaccgtccccagattttatcttgtcttcactgcatatatatatatatatatatatatatatatattttttttttttttttttttttagatggagtttcactctttctgcccaggctggagtgcaatggcgcgatctcagctcaccgcaacctccacctcccaggttcaagcgattctcctgcctcagtcccctgagtagctgggattacaggcatgagccaccacacctggctaattttgtgtttttagtagagacggggttttaccatgttggccaggctggtttcaaactcccaacctcaggcaatctgcctgcctcagcctcccaaagtgctgggattacaggcatgagtcaccttgctcggtctcactgtattgtaaactgctttgtgtgtgtgtgtgtgtgtgtgtgtgtgtgtgtgtgtttgtctttcaccaactcttccccctatcctttattcccttggactaagaggtccagaaatctggtcttccagaaaccttagcttctccaacctctagtgcagtgtttacctgtgctgattttcttttggcttagtctttctccaccagccacatctgtgacagacacatattaaatctcagccctattttctaaaatggggttggggcgagggcaaggtccttgagaagtgccacaggaaaacaacttgtttcctcaagcctcatcctagaaataaaacaaagaataccctcttcccccagcaaagaagggaaaaaagacaaatttgaaatacgtaacccaaaccaccactgatattctgggctgaattctgggcaacttgttaagagtatttaccatatacggccgggcgcggtggctcacgcctggaatcccagcactttaggaggccgaggcgggcagatcacgaggtcaggagatcgagaccatcctggctaacacagtgaagccccgtctctactaaaaatacaaaaaattagccgggtgtggtggtgggcgcctgtagtcccagctactcaggaggctgaggcaggagaatggcgtgaacccgggaggcagagcttgcagtgagccgagatcgcgccactgcactccagcctgggtgacagagtgagactccgtctcaaaaaaaaaaaaaaagagcatttaacacatataagacaagataattttgatgtacttactgggaaccatgttagactatggaaaatctgatttaacctttttttttttgagatggagtttcactcttgatgctcaggctggagtgcaatggcacgatcttggctcaccgcaacctctgcttcccaggttcaagcgattcccctgcctcagcctcctagatagctgggattacaggtgtgcgccaccatgcctggctaattttgtatttttagtacagaagaggtttcaccatgttggccaggctggtctcgaactcctgacctcaggcaatctgcctgccttggcctctcaaagtgctgggattacaggcatgagccaccgtgccgagccctgatttagacttttagacatagctataatttagaattcttttacactaaaatcttaatttttttcaattaaattcaacaaatatttactgatcagctatctgtgcttagcacgatggggtagacagagatttccaaggtagggctcctgctcccatctcccctcccccgagataagacaagcccagtaatctaaatgaagtgccattttagtgtgatcagtaagctgctgatggtgaggaggcagtcacttcctaatttcctaccaaccaagtcaaggccatttggccccagcagacagatagatgggcagacagactcccaggagttagacttgggaggcaagctggggtctcacttggttttcatgacctggacaatctaatttaaaagtgcttcttaagccggtggggtggctcatgcctgtaatcccagcgctttcggaggccaaggcaggtggatcacctgaggtcaggagtttgagaccagcctaaccaacattcagaaaccctgtctctgctgaaaatacaaaattagccaggcgtggtggcgggtgcctgtaatccgagctactcaggaggctgaggcaggagaattgcttgaacccggggggcagaggttgtggtgagctgagatcaggccattgcactccagcctgggcaacaagagtgaaactccatctcaaaaaaaaaaaacaaaaaaaaaaaaaacaaaaaaacaaacaacaacaataaaaaaacaagtgcttcttacgtggtggattttgtatttgatcacatacagctcttaatggctattttatttttttgagatggagtcttgctatgttgcccaggctgtagtgcagtggtgccatcttggcttactgcagcctctacctgctgctgggttcaagtgattttcatgcctcagcttcccgagtagctgggactacgggcacgtgccaccacacctggctaatttcttttcttttctttttttttttttttgagacggagtctcactcttgtctcccaggctggagggctgtgacacagtctcagctcactgcaacctccacctccagggttcagatgattctcctgcctcagcctcctgagttgctgggattacaggtgcctgccactatgcctggctaattttttgtatttttagtagagacagggtttcactatgttggacaggctggtctcgaactccggacctcaggtgatccacctgactcggccttccaaagtgctgggattacaggcacgaaccaccacacccagcgctactttgatttttagatcccacaaagaagtgagaacatgggatgtttgtctttcagtgcctggcttatttcacttaacataatcatctccagttccattcatgtcattgcaaatgactggatctcattcttttttatggctgaatagtattccattgtgtatatgtaccacattttctttatccattcatctgctgatggacacttaggttgcttccaaatcttggttattgtaaacagtgctgcaacaaacaggaatgcagatatctctttgatatactgatttcctttcttttgtgtgtatacccagcagtagaattctggctcatatggtagctcaatttttagttttttgaggaatctccaaactgttctccatagtggttgtactaatttacattccctctaacagtgtacaagggttccctttctccacatcctcaccagcatttgttattgcctgtcttttggatataagccattttaactgagttgagatgatatcttattgtagttttgatctgcatttctctgatgatcagtgatgttgagcatcctttcatatgcctgtgtgccatttgtatatcttcttttgagaaatctattcaaatcttttgcccagtttttttgatcagattgttagatttttttcctatagcgttgagctccttatatattctcattattaatctcttatcaaatgggtagtttgaaaatattttctccctttctgtgggttgtctcttcactttgttgattttatcctttgctatgcagaagctttttaacttgatgtaatcctatttgtccatttttgctttggttgcctgtgtttgtggggtatttgtgtggttgtggcctgtggttatggcattgaccagaccaaggtcttggggattttgcccaatgttttcttgtagtagtttcatagtttgaagtcttagatttaagtctttaatccattttgatttgatttttgtatgtggtgagagataggggtctagtttcattcttttgcatatggatatcctgttttcccagcaccttttattgaagagactgttcttttccctagcatatgttcttggttcctttgtcaaaaatgagttcactgtaggtgtgtggatttgtttctgggttctctattctgttccatggtctatgtgtctgtttttatgccagtaccatgctgttttggttactatagctctgtggtataatttgaagtcaggtaatgtgatttctccagttttgttattttgcttagggtagctttggctattctgggtcttctgtggtttcatataaattttagaattgttttttctatttctgtgaaaaatgtccagtattttgatagggactgcgttgaatctgtagattgcttagggtagtgtggacattttagcaacattgattcttccaacacatgaacatggaatgtttttccattttttggtattttcttcaatttccttcatcagcgttttatagtttttattatagagatctttcacttctttggttaagttaattcctaggtatttaattttatgtgtggttattgtacatgggattactttttaaatttcattttcatattgttcactgttggcctatagaaatgctactgacttttttttttttttttttttttttttaagacagggtctctgtttcccaggctggagtgcaatggcacaatctcggttcactgcaacttctgactcctgggctcagattatcctcctacctcagcctcccaagtagctgggactacaggtatataccaccatgcctggttaatttttgtattttttttttttttgtagagatggggttttgccatgttgctcaagctggtctcaaactcctagggtccagcaatccacctgccatggcctcccaaagtgctgggattacaggtgtgagccactgtgcccagcctgctactggtttttgtatgttgattttgtttcttgcaactttactgaatttgtttagtttatcagttctaatagttttcttgtggaatctttaggtttttccaaatataagaccatatcattagcaaacagataatttaacttcttcctttccaatttggatgccctttatatctttctcttgtctgattgctctagctaggacttccagttctatgttgaataacagtggtgacagtgggcatccttgctgtgttccagatattagaagaagggctttcagtttttccccattcagtaaggatactagctgtggatctgtcatatatggcttttattatgttgaggtatgttccttcaaaactcagtttttttgagggtttttatcataaaggaatgttgaattttatccagtgctttttcagcatcagttaaaatgatcatatgatttttatcctttattctgttaatctgatgtattgtgtcaattgatttgtgtatgttgaactatccttgtatcccaggcataaattccacttggtcatggtgaatgatctttctaatgtagtgctgaattcggcttgccagtatttttgttgaagatttttgcatcaatattcatcagagatgaattttgacctgtagttttctttttttttgatgtgtctttctctggttttggtatcagggtaatactggcctataaaatgagtttgcaagtatcccttcctcctctattttctggaatagtttgggtaggattggtattagctcttctttaaatgtttggtagaattcagcagtgaagccatcaggttctgggcatttttttactgggagactttttattacagccttgatcttgttacttgttattggtctgttcaggttttgaatttcttcctgattcaatctttgtaggttgtatgtacctagaagtttgttcatttcttctagactttccaatttattggcatacagttgctcaatgagtggatttttaaaagtaaaagaaggagacagagagggattgatataaagttatttgttatgaattttcattggtttacagaaataacattgataagtgattggctatatatcctttagctatagggtgtggttatagtgtctggcgtgttgctattaggctaatttacagctacttgtgacaatagcaagtaatttcaagagatgaagacatatagctcaaagaggggagtagggcatgagtgcagtttcattttaatgtctccttgggcctgataatgaaaaaaacttgcatttctcagataaaagtccttttttttttgagacagaatttcgctcttgttgctcaggctggagtgcaatggtgcgatctcggctcactgcaacctcggcctcccgggttcaagcaattctcctgcctcagcctccccagtagctgggattgcaggcgcctgccactacgcccagctaattttatatttttagtagagacggggtttctccctgttggccaggctggtctcaaactcccgacctcaggtgatccacctgcctcggcctcccaaagtgctgggattacaggcgtgagccaccgtgccccaccaaaaagcattattttcaaaaggccaggcacggtggctcatgcctgtaattccagcactttgggaggccgaggtgggcgggtcacctgaggtcaggaattctagaccagcctggccaacatggtgaaaccccatctctacaaaaatacaaaaattagccgcgcgtggtggcaggcgcctgtaatcccagctactggggaggctgaggcaggaggatcgcttgaacccgggaggcgcaggttgcagtgagccgagatcacaccactgcactccagcgtgggcgacagtgagactcctctcaaaaaaaaaaaaaaaaaaagaaaagaaaagaaaataatgatttttaaggaaatgaattttagaagtatgacacatatatcacacaaaaggtatttttcagtttaggctaagggatatgaggagccattgccattaaggatcaggacgtgttcacatggactcctgggagcagccagggagttgattactgattattaacttgtcatattttcacgatgtcggctatcagcaaaacatatttggccaattagtaaagtatctaaagagaacctaaactcacatacattttaggatattaaaaagataaaatgtaacggtgaaattgagaccttcgatgtctgctgcttccaacatcgaaaacacttttacattcccttggtcatatggctttcaaagcctgcgtctggctgggttcccagcttagcgtgctgagcactcggaaccagctcccttccattccacaccctccgggatctccagtgtgaaaatgtctggccctgggtaggaggctgcagatagtccctgggccggggctcgcgctggccggctgcagcgcgcagggtgccaagccctcccctacgaagtctgttttgtctcaggctgggctgagtcacatagaatagatagatagttgatttagcacatgtcctccagatcatattatccgcctacaaatatagcctgttagcgcacaggcacgggaggcttcttccggctcggccgtgctgctcagcgggtgtaaacagcctctgcggtgtaaacagcctctgcggtgtaaacagccgcggcgggcaggccaggactgtcagtgcccgcccctcggggcaggtaagcgctgggcgtccgaggtggccggggggcgggagcgggggccttgcgctccccgtgggaggacgcgggcggatggccggtgccccgggcgctcagttgtttaatccttcctctgtgccttggtgacctgcaatctgccggagcgacaggggtaaacgtccctaaccggacagcggctggggcttaggcatccaccgttatctgaggtccaggactatggtgggaaggcgagaaaggagagagcgtggggaggcaggggtccccgcgagtgaatcttgctccggcttagcagttcccctgcgcgtactgctccggcgcccaaggctgagcccaaagctttctggtccaaagcgctgtccaggggagataaatcaactttgtttgtgtcctgaatggtatgattgacacatggccctggcggggaagtcttttcttccagcgtctcacgccccctggcttggggtggggacaggcctgaggcaagggcggaaagtgactggagacccagaggaggaggaattgtctggcttgttagcggctctgccctgttgctagctcttctgctggaccaaaccctctcccagaactcagggactggggggttcacccattattcacccaaagaacctctgctaatcatgccaggtggaggaaaaaccctcggatgctcacatacctcttgtttttgtcttacatttaattggtgacagggattcttagtttcctttcttttttctttaaatgattgaacttttttttgatcttgctaggtgccaggtactgtcttaagctcttgacacaatgatcctatgtgatgttctcgccaacctgtgagctcagtgctgtttgctccatcacgtccacatgagaacatcaggctcagagaggttaggctgtgttctcagggacatgtggccagagagtgggtaggcagggctcccgcccaggcagcttggccttggaattgccctcttaatcccgtctggaccctctgcctcccctggctggattttctagctaaacaaattacaataaaattaatcagaagtccccagggaaactctgatcatgtggcataaatgtcatttaattcagaatttggctgactatactgaccttacttgactatttagctcctatttacccccgtttctatcagaaaactcactgcgttcattccaacgctggtgtccaggcagtggccttatgtgaggatagaatggaatttgtgagtcaccaaagctccttggttgtcatattattgcccattgtatcttggtgcccccagaaattcccatgggttacagtggttctcttggatacagcaaggctgatgatagaggttttccttacattgatgacacgcctggaagggtgctgtggagggcttggagctgggcagcctggggtggaggggtcctgggagttctgaggggcaggtgtggaggagagagcctctctctgcatggctggttaaggtgacctctggcatcagctccgtcctcctctcctgctccatcccttgctcctgtccccctcccagcctcccagtgggagtgccaagaatggcttggcacctgcatgatgaggtgagtctcctcccagactttgttgagtctcctcccaaactcccccagatccttcttaggatgctctgagaggttaaccctgcacccactccacacctcctacctagcaacccagtgtaatttgacaagaagggagaggactaggtgaccggaaaaccccccctccccctggcatatgacttctgagtggagactagtgccctggtgccaggggacatgtttttccagtcatgccctctggctctgtaaagtggatggctctgtaaagtggatggctctgtaaagtggttctgatataactgggttggggaggagggtgtggaaagttattcagccaaacctgccctgtcagccctttccccttcctcaaggtccctgcaggactctcccaacccctcccccaccctttctcttttggcttctacaggggttggttcagcctctgttgtctaatgaacgtgctgtgctcaaatatatcctttgatgctctcccctctagattgggaacttggagtcatggacaaggcttctgtctttctgcatttaatgaatgtccataaatgtcacttagggttcctaggcattgaaaaacagaaatacaaactaagtacactggctcagtacacacggtttctgtgttgaggttcagaagcaggagactggcatctgtagcccttggactactcaaaaccccctcatttgatggccatagcacacctctgtctgcaggggcttggacaaggtgatggagaggccccaccagttcccatcgtatgctacagtatgacctgctcagctgaactcatgggggccggtgtgtgaacccaagtctggggactcccaagtggctgctcctgtcagtaaactgtggctcgtctatggcttggtccatggacagacaaaatataatgaatcaaatactttaacttgcatgaagtattgtgatgcaaataaacagtagactgagaaataaaataacaggcgggtttactttagatgaggaggctgggaaggccagacaggagaaaacatttaaggtgggttccaggggtgtggggaggaagccatgtgacttggggaggaatgctctaggctgagggagcagtgtgtgctgagctctgagggggaagaggcgtggggtggataagcacagaggaggggagcaggaggggtgaggtgggatgggcaggccgagggcagaccatgccaggggctcactgcctctgtggaaagctgggatctcattctcatttcaaaggcaggccttggggagatttgtgccaggtggtggcatgatctagttctcattggaaagtgactctcactattgagtagaagatggggttgagtgggaagccaggagaccaattagggggcctttccccaactgaggcaaggcgtgacactagttggtggtgagaaatgcatgccctctaagatgtaggtgataactggaggtgtggatgaatgtgtgtgtgtgtgcatgcatgtgtgtgtgtgcatactatctgcatagtgggtgggcagagtgaggaaacgaagcaaaagaagtgacttctggccgagtacagtggctcatacctgtaatctcagcactttgggatgccgaggcgggcagatcacctgaggtcaggagtttgagactagcctggtcaacatggtgaaaccctatctctactaaaaatacaaaaattagccggatatggtggcttttgcctgtaatcccagctactcaggaggctgaggaagaattgcttgaacccaggaagtgaagtttgcagtgagctgagattgtgccactgcactccagcctgggtgacagagtgagacttcatctcaaaaaaaaaaaaaaagaagtaacttctagatcttctagattatgatggagtcattcctgaggtgtggaattaaaggaggcctaggatggacaaactctaaaggagcaagtttggagaacatcatgtttctttgagatatgtgtgagacatccaagtgcatattcaaggaggcagctgaacatgcacaccagatggcaccagaagttaagactgatttttaaagtgtcttttataaaaatccactgtcttggttatttattgctgcataacagtttattctagactgttagtttagaataacacacatttattatctcacagtttctgagagtcagaaatccagggcagtttagctgagtgtttctggcttagggtctcatgaagttgtggtcaagatgtccacaggggctgccgtcatctgaaggcttgactggggatggaggatctgcttttaagacagccccctctcatggctgttgacaggaggcctcagttcctctccttgtgaagcttttccacaaggctgcttgagcatcatcatgacatggcagctgacttcctagagtgagtgatctgacagagagtgaagacctagtctcagaagccacacaccattactttcaccacattctagtcattagaagtgagtcactaagtctagcccatgctcaaggggggaggaattaagttctacctttttaaagggaagaatgtgaaagactttgtggatatagtttaaaaccatcacatccaccaaagcaaaatattttacattttattgtccactaaagctaggatcagtaaactataacctgcaggcctggcacctgtttacatatggaatgtgggcactgctggagcatctggggaccaagctggggtattttcttctgtttctactcccccactgctctcagctcctgtccacctggccagctgtaccttgctgcagtccagggcccaccctggttgccatctacacattggagactctattgttagcaaccaagcaatggaatctcagttcaggagctggtgactgagtaggtcaccttgcttccagccagctatccaacttgtgatgacgggaggagagaaggacacacaggcacctgtctgggtgatactggggcagagaaagaaatggactgcagcaggctcactccccggccccttcccctgccaacctctcccctctctttttgtttttttgagacccaggctggagtgcactgatgcaatctcagctcactgcaacatctgcctcccaggcccaagtgatcctctcacatcaacctccttagtagctgggaccacagatgcatgccaccacccagctattttatttattcattttattttttatttttggtaaagacagggttttgccatgttgcccaggctgctctcaaactcctgagcttaagcaatccacccacctcagcctcccaaagtgctgtgattacaggtgggagccactgcacccagccaccctgcccctttttcaccatacctactagccctttccctcttgggctagtccctcttgttctgagaatgtttttggcaagcagcagctggacatgaaacatgctaactactccggatggttctctgggggcaagcagggagaggctcgccagagggttctcctttgttatgtaaacgcctacatatatcttcaattttgcttattggcctgggaaacctctattatttaccatcaagttttctcagccctgtactaaaacaaaagattttccaggcattattttccttaatctaacctttgagagtgtgctgatggttaacattttcactcaggagctggaacactaagtgtctgggagtccttggactggagaggaacatggctgatgacactttgtggccccagtgttctttcctttacagtgagagatgccaccgttctccttctgtctcatcattgcaggtgttttcttctctggaagatgctctgtgactgtggacagtgtagcccaaattgagggaggcttgttctcataattctgctacaaccacacaaaaccagacccacagcagggaaccggaatcagatgctgtcttggaaccatgacactttgctgtcaaattcaacgagggtccaggctgaagctttacacttaggctgctttgtagaatctacttcgttgtaaagtttcctataagaggatattgctttgtttgtattgagggtctcttgactggatcccgtagaggttaatttttcccttttctgtgttggggtagcatatgatgatgatgacatttctatagtcctaaagaaagttaatgcttaggacattgcattctatgtctttgcctgaaagattgtgttgactagagtttattttacaaagaagagattagctttgtaaatttgtgaggagatctctcccctgagctgctgagggactggcacctgtgtctgtccctgacaactgtgtcctatgggctccccagtgtggtttctcccctggatggagggtctcctccttaccctggactgacacatggactctcatttgaactactttctcagtctcagaacccacccatgaactactaccttctaggttaaggtaaaatttgtccagttgtctagagaggtctggacttatctctgtcctacatgggatgccaagggctgggctggacctggcacttaggatcttgtatgtcatagcttcccagcacctctggacatcacatgtaaatctctagcaaatgtggtcatcacctactgttcttagtctccagttttcattatacatgttgcaaacaaaacttcgcaagatgctgatttacatcctggcacattcaacgcccccttaattgtataagagaacttcttttcctgctttttaaaaacacagggaaaatggtgaacatggttagatgacagacagaatatgctctttcccaccaaaatactgagagtagtaatgacttataactacttaaaaatatgtcagggcctttggtaattaaatttcataattccaggaatttatcaaagatgattaagccattttttgttgacatgatcaaatatttagaacacaaagacattaagaagagaccattcctctaagatgggaactagaattacatttctctaagttaatacatagaaattcataagcaatgattttaaaaatgtaggggcagttaatgtacagctctggctactagccaagggctaactggcctgaggaaatgaaagaacctcaacaacagagtctgtgatgtgtctggttgatctagagaacacgagccctgtgtgtagggagtaattcttccagcttcagttactgtggctggctgggctgcccacactgctcaaatacagttaactttactttggctttttggtttatgtgtagacttgggatctgtgcacagatttcctcaaaaaaactaggctgactgattctcttattaatgtttcttcaccactggctgtggactttgatctttattttcaggatgatgcgtagcgttcctttatggagacttttaagtcgaaagccaaagccttaattaagatctttgcaggttagatactcctgagctgaagataacagagtaagaaaagtggtaaaagaaaaattaaatgcacttcttttacctatcatttttatggtagacatttgaaatttaccctttcagtgattttgaaatatgcaatactttattattgactatagtcgccctgctatgcaatagatttcaaaacattcctcctacctatctgaaactttgtaccctttgaccagtaactgcccattcccttcctccccggccccaatctctttctacactctacttctacgagttcaactttgttagatttcacataaagtgggacatgcagagaaccttccttttctgattggaggagctatagcccaaaagagtggagcaaaccgtcacgctttcttactttcttaaatcttcgctgcttggccgcgactgtgggtgcagttgtaggaagtgcacggcagagcagggtaactacaacaccaagtttttggccagaggcccgaaaaagggagcccagcgatcaggaaaggaccagggagatcacagagagggaggaatttggaggaaacagctccgtaagtttgttcctgggctcctcccctagctgcgcatgcgtggatctgaccctaaccagcactccaaagaagttagacctggacactggaatagaccttcagccacgccgtagacgggccactgggtggtgcacacggaacatagctgaatagcaccacgaagactgaaaacagacctgacatggggatcacaccccacagaaggcaggttggaatttgaggtcagaactcaaccaaattggttacccacggtgtcagttatcaacttactgcttctcagctttgaatgcgccactcaataaatataccctgtgttatacaatggcattcctttaaatattggccctttaaagtgagcgcagtgctgtgctttctcagtagaaggcactggaggggcaaggtagtaggaagaggcttcctgccttttttttggcgtgggctggggatcagcagtgtgcatgtgagaatatccatcggaatctgccccaagcatgggctcagaacagtccctttgcgactttgcatccttggccttgcagtcacctttctacagctctcttgagccagaacacagagcccttgtgcagcccacgtgctctgaagaactcctgcctgtgcttgtatttcgactttcttcacaagcctgcatattacctgcacacagctgcctgtgcccctgagggtcacatgccaacctgcgatgccttctgcaagtgcctgtgtggtccacacactctgaaggccatctggacttccatcacatgcccatgccaccagttgctgattggccatccctacctgcacttgaggggttctcctattagttacccagcaactccagactagcctgcccaaaccagaggacttacctgctatctgatgggctgaaccccttccaagttggcccttccttggatgtgctccctcagccctggggtatgaatggaaagatagaaaaatatcaacaaagaaacagaagatataaagaactaattggaaattttagaaataaaaagacaataattgaaataaaatactggataggctcacaaacgtaatggagatggcatagggaagagctaggaaacttgaagtagattactgggtttcatgcgcatctgtgtgaagagaccaccaaacaggctttgtgtgagcaataaagcttttaatcacctgggtgtaggcaggctgagtccgaaaacagtcagcgaagggagatagggatgaggccgttttataagatttgggtaggtaaaggaaaattacagtcaaagggggtttgttctctggcaggcaggagtgggggtcgcaaggtgctcagtgggggagtttttgagccaggatgagccaggaaaagggacttccacaaggtaatgtcatcacttaaggcaaggaccggccatttacacttcttttgtggtggaatgtcatcagttaaggcggggcagggcattttcacttcttttgtgattcttcagttacttcaggccatcttggcatatacgtgcaagtcacaggggattcgatggcttggcttgggctcagaggcctgacactgggcattaccaatctgaaacaaaaaatagaagagaagatttatctgaaatgaacaagccctcaagaatctatggaacaatactgaaaagtctaatatttgtgtcatcagaattccagaaggagaggaggaagagtgtaatgcagaaaaaatgttcaagaactaatggctggggctgggcgcgatggctcacgcctgtaatcctagcactttgggaggctgaggcgggtgaatcacaaggtcagaaattcgagaccaacctgatcaacatggtgaaaccctgtctctactaaaaatacaaaaattagccgggcgtggtggcacgtgcctgtaattccagctactcgggaggctgaggcaggagaattgcttgaacccgggaggctgaggttgcagttattggagatcacgccgctgcactccagcttgggcgacagagcgagactctgtctcaaaaaaaaaaaaaaaaaaaagaaataatgactgaaaaatccccaaatttgtcaaaagatataaaccaagtgattaaaaaagctaaacaaatctaaatcaggataatcccacccaaaatccatgcccagatataataattaacctgaagaaacccaaagacgaaaaaatttttccaggtgcggtggctcatgcctgtcatcccagcattttgggaggttgaggtgggagaatcacttgtgcccaggagtttgagaccagcctgggcaacatagtgagaccttatcgctgcaaaaatatttttttaaaaaaattagccagatatggtggtgcatccctgtgtttccagctacttgagaggctgagatgggaggattgtttgagcctaggaggttgaggctgcagtgagttgtgatggcatcactgcactccagcctgggtgacagagtgagatcttgtctttggaagggggaaagaaaaaaaaaaaagaaagtagcaagagaaaaatgatgcatctcctataggaaagtgtgattcaaattatttcagatttctaatcagaaactatggatgccaaaagaaagtggcacaacattctaagggtgctgattaataaaaaagaaaagattgctttcaaattctatatccagcaaaaatagtatttatgaatggaggtaagaaaaagacatcctcagttgaaggaaaccagaatatgtcagtatattttctctaaaataattgttaaggcaagtttttagatagaagggaaatgataacagatgtaaacttgaacagcaggaaggaaggaacaggaacatataaatatcaagataaatataatggaccagttttctcctcaggagttctttaaatttgatgattggaagccaaaaatataacattgattgacataatacataagacaactgcaacataaaggtgggaatgtaggaggacctatatggtggtaagatttttacatctcacttgaagtggtaacatactgtttctaagtggactatgaaaaagtaagtatgtataataattcttagggcaaccataaaacaagagaaaaaaactacccaaagagacatagtaaaatatataatagagaaactaaaatggaattctaaaaaatgttcagagaaaagaaggcaggaaagtgtaaaataggaaaacaaaagagggatcaaatagaaaaaaagtaataaaattacagatttaaatccaaatatacaagtaagtgtattaaatataaatggcatacatacatcaattaaaagatagagatagtcagaattggttaaataaatgatccagcaatagtctgtctacaaaatctcacatcaactataagcatatagttaggataatataaaatgatggaatcaagaaagtgaaaagcaactcacaaaatggaagaaattttttgcaaattatatacctggtaaaggacctgtatctagaatatataaagtactattgcaacttaacgataaataaaaagaccaattaacccaattaaaaaaggggaaaggatctgaatagacatttctccaaagaagatctataaatgcctaacaagcatatgaaaatatgctcaacatcattagtcatcaggaaaatgcaaatcaaaacaacaagatacctcttcacacctactaggatggctataataaaaaagacagttaataacaagtgttggtgaggatgtggagagacaggaatcttcatacactgctggtgggaatgtaaaatgatgtagctgctttggaaaacagtctgacagttcacagaaaggttaactatagagttatcatataatctaacaattctcctttatatttaccaaggataagacaacaaatgtacacacaaaaacttgtgcatcattttaacttttgtcaaaaatctcctttaggtaaaacaattcttcttcttcttttttttttttttttaagacagagtcttgctctgtctcccagactggagtgcgctggtacgatctcggctcactgcaacctccgcctcccaggttcaagcaattctgcctcagcctcccgagtagctgggactacaggtgtgcaccaccatgcccggctaatttttgtaatttttagtagagatggggtttcaccatattggccagggtggtctggaattcctgacctcatgatctgcccacctctgcctcccaaagtactgggattacaggcatgagccactgcacctggcctcctttaggtaaaacaattctaaaggaggcaaaggcagtctcaggctgggcagactgtctcatgccgataatcccagcactttgggaggcctaggtgggtggattgcttgagcccaggagtttgagaccagtctgggcaacatagtgggaccaccatctctacaaaaaatacaaaaattatctgggcatagtggcgcatgtctgtagtcccagctacttgggaggtggaggtaggaggaatgcttgagcctgggaggttgaggctgcagtgaaccatgatggtgtcactgcattctagcctgggcaacagagtgagaccctgtctcaggaaaaaaaacaacaaaaaaacaacaacaacaaccaatgaaacaacaacaacaacaacaaacaaaggcagtctcagacatcagaaatcaaaggaaagaagggaataaattaggtcagcattgtcagctctttagagtaaaattatatacgttcatattttcagctgcacaaacataagccagttctcccattcttattggcaagccatttatagggagcacattcttgagtcagaagattaaatattttggccaggcatgatggcttgtgcctgtgatcccagcactatgggagactgaggcaggaggatcacctgagccccggagttcaagaccagcctgggtaacatagcgaggccccgcttccacaaaaaattaaaaaattcaccaagtgtggtgacgcacgactgtggtcccagctacatgggaggctgagatgggaggatcccctgagcccaggaggttgagggactacagacatgcgccactatgcccagatccaggtgcaatgagcagtgattgcacctggatcactgccctccagcctagggaacaggtaataccctgtctgaaagaaaaagaaaaagaagattaaatatttggcttcatatccgtgactgctatatagaagtgtctgaaattggaggagaaagtattcaccagccctactatttagcaactgacaatctgtgtttgtgcaaatcagggcatggatttagcaagactttgctgctgcacttagggaatttcaaaacaatatctagaaagttactttacttagataagggacataagtataacttagtggaatgtacactgaaaggtacttttctgtcctgacaattttttttttttgcaatgatcaaataattacttaaaacaaaaagtaaatgtaaagtagaaaaataaaaaagaagagagctcatttagtgtcctgagagtgaagcaatatcttttatttactcattcattcattcactcactcatgcattccacaaatatttatggagggcctaccatgtgcaaggcactatactaggtgccagggatatagacataaagttttggtgggcctctcatgtttcatttggtgacactgaaaatagagactaaattatctctaaattcccactgagatgtgatggccaaaatgtacccaagtttgactttccttgctctttgaaaaccaggtaaacagagatcaatggtttgtgaaggttcaatctgcagggaaacctcagaggacatgtctccaggctgtgtggtcagtcttaagtggcagagtgctcagtggggctcagtgccattttttttttaacttaatggtggctggcctgtggcctcagatgatgagggctggggatattggggaggagaggcagagactggtggtggcagagactaccctggagaacagaaatgagttaggtcagccggactgaggaaagaaggcaggaggaggatggaaaaggcaatcccagaggggaagaattgaggtgatgggttacggaagaaagtcgctgttacgtgcctcatgtcctatacttaaaggaaggaaagaacactcaaatatctttagaataaatttctaccaacaaaaggggacttttagaaaagcaattataacaccgcctatgtgagcttttttttttttttagatttaaatacaactaagaagttatattccgttctacttgagagaggagagaggatgtgtgtgcgtgcctgcctgcgtgtgtgtgtgtgcatgcccgtgccctgtgattaattcatctaacttatccttgattatgtaacaacctactgggaatattaggtacatatactagtgaatttaatacaatgtggaaccgtgaagtttgaggaatccccagggggctttgggagcccagagtctatctgagggttaaggagacaagtgtgaccatctagagaaggtgaccctagggtgagtgttgaactatgacttacttacacaaagtactaccaaaccttaagaacattaggaaactgtcatcctcccagcctcggcaatagagtgagaccctgtctccacaaaaaattaaaaaattagttgggtgtgatggtgtgatcctgtagtcccagctgcttgggaggctgaagcaggaagattgcctgagcccaggaggttgaggctgcagttggagctatgatcgtgccactgcattccagcctgggcaacagagtgagactctgtctcaataaaaacaagacaaacaaaacccaaccagccaaacaagctaaaaaaaaaaaaaaaaaaaaaaagcaaactgtcatccttgaagtagtaaggcatatcatcattccttaagccaagtgattcattcatatttcattttaaagtttatgttaaaactgttttctgtttgtgtatcaagctgacatatctatatattttttaaataggtaatttcatgctcccaaaatgggacataaagtggttgtcttcgacatttctgtcatcagagccttgtgggaaactcgtgtcaagaagcacaaagcttggcagaagaaggaggtggaaaggcttgagaagagcgccttggagaagtacgtgttttctcaacctagtcttgtagcttgtttggtgaataaggatttggacaggcaacagttgcgttgtggaggaggatgcttttcttctgggatttctcactgttggtaaaattttcctcattaaacttcagagccttacactgttgctcagtacaaatacgcagttcctatgatagcaacacccatggttataaggacctacccaccacccttgtggtaggcacgaggaagaccgagatgacacgataaatccccccacagtaaatgctgtagcaggctgcctagctagagttcactgagctaactcactaggctgtctggcgctctggacaccatctgactgccatctggggcagcttggggctactctgttgtgcacttcagccctcccccattgagctgaattctaggtaagattcattgtgttggtgtcgtttttacttggatgaaatggtgtcatttgcctatcatatacggccgtgaaatatgagtaaaagaaagttatgtatatgaacaccaagttgagtgctttggaaaatctacaaggtagaaaggttgaagatggctttgcatatgtctgcaatttttattccctgtggagaaaccagaactggaactcatggatgatgcattaggggtgctgtttatataagattgacacaatgggattctcattggcagacccattctcaaagaaagtcccaaccctacatcaagttggccaatgatggtatatttgcacactttaaattaaaagcaagatgtgtaggggctgggcgcagtggctcacgcctgtaatcccagcactctaggagaccgaggcaggcggatcacaaggtcaggagatcgagaccatcctggctaacacggtgaaaccccgtctctgctaaaaatacaaaaaattagccgggcgtggtggcgggcgcctgtagtcccagctacttgggaggctgaggcaggaaggcaggagaatggcgtgaacccgggaggcagagcttgcagtgagctgagatcaagccactgcattccagcctgggcgacagagcgagactctgtctcaaaaaaaaaaaaaaaaaaaaaaaagatgtgtaaggtgtgaatgtgtctacattcttggttctccaccttcattagctttttggattaaacaaatacctattctgatcatgcttgataattaagctgctactgtattcatcacagtggtttcaggtggttaccaccatccctaatttgcagatgaggaagttgggacttaggtaagttgctcaagttcacacagatggtaagtggaagatgtggccaagcccttgcctctgtataatgctgtaatcacaggtagttagaacgtcttttctcttgccactaatctgagattgtccaatatgacataaaggattgcttgaggagtttgagactagcctgggcaacatagtgagactctgtctttacaaaaaaacaacaaaaaagaattacaacccttaaaccagaaagcccacatggcaacgcatccaagagacctacactcacataaatcatacaaggtcccagagcccaaagtagctctcagccctgctttgatttcctccgcacacctagcatctggggttactctacagcagaacaagcttgctgcatggaggcccacgcccttggcagtggggaggggagttagggaagcacctgtagctgatgcaacttcctgaggttcttggaagaggagccatttgcagacacctggggtctgcagactgtgctctctcatctgctttggagtgggatctgccccttcaacgctgtctttctttgaggtgttaaacagcttcacgcatctcatgtacataggattgagcttgacttgggctcagtgtcattgagcttgtgcactgtctcatcttaacctaagacagaaaacttcttggatatttgtttggcttttctagcccaagataaggaaaacagccaccaagttggctgggcagataaggaggaatgtgaggtagggctggggaagaatgtgcatgtttaagaaaggaacttagtttctcagcctcttcagaaatgggggtagtaaatttgccttctttacaggtgtttttgagcttccataatataattcatactgtgatcattagtactatttgagggttaacttttagtttctcaggatctgtttactgttcaaaggagtaattaatatgttgaaaaattaatgcctgcctgattataaaaggcaactatttggttaatttaaatttactgaaacaaataaaacctcctagcttgttctgttacctcactttagggtatctcatcctgtaatgctgtagttgttatgaagtatataccgatacttaaacattataagtagagataaaatatgaaatatcactctctccgaatgaaacttgatcatttggagcggaggttcccaagccctgggctggccttttaggaactgggccacacagcaggaggtgtgcagggggcaagcgggcattaccacctgagctccacctcctgtcagatcagcggcagcattagattctcataggagcacaaacccttttgtgaattgtgcatacaagggatctaggttgcccactgcttatgagaatctaatgcctgatgatctgaggtggaacagttttatcccgaaaccatccccccaacccctcatccatggaaaaattgtcttccatgaaactggtccctggtgccaaaaaggttgaggactgctgatttagagggagaaataaaagagctattgttaggctgtaagtgaagaatttcttctccattgaggctgtttgccatctgggctgggattgtggtttcctttcctaaggaaaaggtattttatttacacatttattgatttaattagaagaactctaatggcattttttttgtatgtttattgcatatttggcattcagctaaaactgagttgagaggaagatttcacattgaattatatgggtgatagagtgaaaagacaacgaattttatttattttaattactttcaaggaagagaatggaattaaaaaaatagtttatatttccttcttcactttcctttcatcaggtttcagagggaatcagacataaaatatttaagaaggaaaataagacataaagaaaataagacaacaaatatttaagaaataatacaaaatagatttggtatataattatttttaatggggtacatctaattttcttttttctccattttatattggctgtaccaaaatatgtgaaatatttataacaatttgtaatatgtgctataggaatgatatattacatagggatgagccggtatcatctcattatattgctaggatctgccttcaggttcagtctaagaaatgaggaaagaaaagttagagacattaatctgaaaagtgcccagtgaatacaagaacttgcagtggctgtgctgttggttttaaaaattttggaggtattgcttctaacagaagttctagcagcatgtctttgacctagagtctgccccttgtcctgactgctacagtaagatctaaatctacaggtagatatttaaaattcatttttatcatatggttataaaactaaatcacacagaaaagctaataaggaaaagcaacaattccaagccactacaacttctcccagaggagcccacttctctttcagcactttcttctgcttttaaattcatatcccttcatgtgctgacacacacacacacacacacacacacatacacacacacatatgttatatatatatttttttttttcttgtaatttttttgggacaagtctctttctgttgcccaggctggagtgcagtggtgtgatcatagctcactgcagcctcgacttccagggcttaaacagttttcctagctcagcctcctgagtagctgggactacaagcatgtgccaccagccccgctttcttttttttttcttgtattttttgtagagacaggggtctcactttgtttcccaggctggtctcaaactcttggcctcaagtgttcctcctgcctgaaccactgcacctggcaatatttttaaatttatcacttttgttatattacttatagacttcatatgtagatcctgaagccctgactcatggattgctgggtggttttccccagcgcagctcactgggactgagacctatagagctgtgccagccagtgctgtcagcaaaatgtttttcttcaaatgttccagcttccctcagttgaatggcaagcatgaaactccagcaatatctgaaatggtttcttaaaagcaaaacatctgattaagaaggtgacatttgcatgtagacctggggagccagccctgcagaaatctaagaacaagggttgcaggcaggcataacagcaaatgcaaatgccactgacaccaagagaggggcaagggagttaaggatggatgccaggaggtgattacaatgggatccatgaatatgttttcctttcaaagccagaccagtgtgcaaggttatgagttttccttcatctcatttactgtgtgggggcaggtgtagagcagggagataatgggatataaactgtggcaggcatctgtaatcccagctactggggaggctgaggcaggagaatcgcttgaacgtgggaggtggaggttgcagtgagctgagactgtgccattgcactccagcctgggtgacagagcaaaactctgtctcaaaaaaaaaaaaaaaaaaaaaggagcaaattggtgtttctgggggtgggagagggttgtccctccactggatagaatttctgtgtgtttatggataagaattatttgtatggctttccgttttctacaagttaactttactctctacagagttataaaatagcttagtcaaagtcaaaggtacatacctatagaatcagagaatcccctggaggctccggcattccgggaaaaggctatccatctgtgttttgcttctttcaaaatctgaaatttctccttacacttgacagtgcctggtggtccagactgggacttcccgcatgcccagtcctagaagctggtcttgtcccaggtgcagtaaaccttcagacccctcctaaccactccaatggcaggcttgcctgtgccccacagtgccaccctacagcctaactgagactctgaaccacccttccttcagataacagcagagagtttccatactaggattgttccttgaccatggggcttatctcacacttatttagtgtatatactgccttgggccacgtgaagaccaagtctgcacctgcagctggtttctaaagtagcccccagaagacctgaatcctgactgccgccaggttcccagttgggctgagtagggtgtggaatgcttttctgagtgtggaatgcatctaagcccctatcaaaggtgggctaccttattttgagtcagacaacatctgtgtttgatggttttgaaggaaaaccacaaaacatcttgttttgcatcacatagaatatgttaaaggcctcaaacagaaaacaaattcctaaatgaagaaaggcccaccaggtgcagagccctgttctgacagctgtgtgggcatctgaagggctgtgagacacactagctgtcatcatggagcttagcatcaagctgggggataagctatggatgtggaaagctctaaaagataggtcagaaaattagcgacacgtggggtggtgaggtttggtggggatgctgagtcctcagccagctccagtgtctgagtggacctcaggtccatctacaggaataaaattccccaaggtggctgatggtgacattccaaagtcaggtgttttatacactgaagctcctctgtatttctattcaaatacccttgaaagatcagtgaatccctgtggccctgcacttttttaaaacttaggttggcatgatataatttcaaaggaaattataattaaacgcatagccagaaattccatctaacccatcttctctacttttaaagttgaagttactaataattcacaaaagggtttagggtttcccctgcacccccacagcagggaggaaagaggaagggagtgcttacgtaggcctgggaatgacaaggagagcacctatgcccaggtggctgactcacttctctaggcaggtgatggccagtccccaggagagtaactgtgacccctgctgcctgttttaggataaaggaggagtggaactttgtggccgaatgcaggaggaagggcatcccccaggctgtatactgcaagaatggcttcatagacaccagcgtgcggcttctggacaagattgaaaggaacactctcacaaggcagagttcacttcccaaggacagaggcaaacggagcagtgcgtttgtgtttgaactttctggggagcactggacggtgagtcgaggcagttctcgcccaatgcagtgctgtggtcgatgactgctgctcgcctgagcccaaggatgaatgaatgaatgcttttgcctttagaggaggttcttctgtcccttcctcagtgaaacgcagcgcagtcctggaagcagtgatgggacccacttggatacctctgtggctgagcagctgggatgcacgtgccctctcctgggcagcacagtctttcaggatgcgttcctctcctgttccccgccctagacccttaacataattctttgtctttaaaaaacatcaatttaagtgacggcgcctttcattcaactaacgccctggcagtgggcaattacttacttgccgaagtgccgaagggcagcaaaggaatttctgcagatcctttatctggttttcctgtcctgagattctgaggccagggcaaagacaattccatctttctttcctcaggtcccataataacttgggctattgcccatttcatcgggacagggttccctgggaccctccgtccatctctttgtatcttgccattttgtgtcttttttgttttgttttgttttgttcaagagtcttgctctgtcacccaggctggagtgcagtggcgagatctcagtttcccgaggagctgggactacaggtgtgtgccaccatgcctggctaatttttgtatttttagtagagacggggtttcaccatgttggccaggttggtctcgaactcctgacctcaggtgatctgcccgcctttgcctcccaaagtgctgggattacaggcaagagccaccacgcccgggctttgtatttttttcctagaggcggggttttgccaggttgcccaggctggtctcgaattcctgagcttgagcctattaccctgccattttgtgactaaaaggactcggtggagagactaaatattttgcgtgacctggggctgtcttttattagccatgtgatccgaggtggtttttatcatttgataaaaatgcatatcacttttatgggtttttatcattcttatcagtaaaatgctgctaatgcttgccctgaccctatctgagtgctattgagaggatgaagtgcatgaatattctgtaaagtatacagttctccaaaaatgcaagaggttattactgtaaacctctttactgttctttcccttgcatccccatcattgagatcagtaggtaacgggctgcctattctagggcacgaagggaggcatgtctggattgttaattaaataccattggccagtaaacacgatcctgggtgtggcacttaccctgtaagggtgtccagttcacctggagaacctgtcacgagccctcatgtttcacaatctaccttttgaaaatcattgtaaagggtatttattatttattattattattattattattattattattaattgagatggagtctcgctctgtcacccaggctggagcacagtggtgcgatctcagctcgctgcaagctccgcctcccgggttcacgccattctcctgcctcagcctcccgagtagctgggaccacaggcacccgccaccatacccggctaaatttttgtatttttagtagagacgggttttcaccgtgttaaccaggatggtctcgatctcctgacctcgtgatccgcccgcctcggcctcccaaagtgctgggattacaggcgtgagtcactgcacctggcctgtaaagcgtgtttaatgtgcccggtatggtaaagggaatgggaagatggttagaattcagcaggctgggagagacctccattgtgaaccaggtggatggcgtcctcaaaacttgcaatctctttgtccccatacgccatcccctaagccgtactctgttgtgattgagtacaggagagtccaggaagactctgggccccacatattctttagagtgaatttcagttaccgttttcctcccccagagagcttgtgcttcggcctcacctctgactaaggagtgaaaggctgtgtgtgttaagggatttttcagcctcttagagtgctctgtggcagtgagggatttgtggcctccaaagtcacacctggcagcctgcctggcccctgcaagaggtcaggagggaaggaatgggctgtggagcttctggggccttagggactaggtagagagagatctgctgcggcccttagggctggctgaggctgtgtggccagcttgggctgagggctggggctcctgttttgagtcagaagctctcagaccccggaccctgctcgtataggggagatcctcaattttattttccaaccctgcaatagaatttttcatttttactaccacatgtttaatttccccgagctgtttgctgtttgttttttcaaatggatgaattctgtgaagtggctttatttttccacttttacagatatctcttaatcttagcttttaaaattttgttctgtttttattttgcagggtaatggcttttcttagctatcttgggatcaatcttttttttttttcttttcttctttttttttcttttgtttgttttttgagacagagccctgcttagtcactctgtctggagtgcagtggcatgaacatggctcactgtagcctctatctcctggactcaagtgatccttccaccttagccttctctgtagctggaaccaacaggtgcatgccaccacactcggctaatttaatttttttttaaagatggagtctcactttgtggtctgggctggtcttgaactcctaggctcaagtgattgtcttgccttagcctcccaaagtgctggatagtttttttgggggggatgctttcttgtttcagagtttcctttttcttttagggtatgtgtctttatcttgcatgttgggacatttcttggaggtctggagacactgggttgtccagagcactaacaagctgaccagaagctctgagtgtgtgtcgggcacacttagcttttgaggaagttgctgtaaagtccccatctcactggtgcctcccctctcctattcatgattattcatgaatgttcatgaatgcacattcatgatttgtctggagctatgggagcatacagagaaggatcttctcagttcctggggcagagagaatctcagcattcatcactcatcatctgattgccacctcccctgcctcagctgtgcttgaggtaccccagttcagggactttgttgaacctcctccagtgaataagcctcagcttcctactggtggggagcagaggtaattgctgtgtggcatggatgggggtcaaggttctggtcctcagactttgaacccgatctctttctttgggccgtgacttcagctctcacttccaggggtaccaggctcttctactgccgagtctctggtggcttctggtgagaagcccaggttgtatctcagttgtttctgctgctagtctaagattgagcagctctgggaagccaggttaccatcttccggctgtctggttatccacattttgcagctgatgtctcctttccctttctctttgcccttctgcaaggtttatggcacctaaaaagttcctgtactgttgtctttaatggaattttggagaagagcaaaagtacatgcatacattcaatctgtcatttttactcgattcttttcatttctatttcatttgatatcctaatatttttcttttcttttcttttttttttttttttgagacggagtctcgctctgtcgcccaggctggagtgcagtggcatattctcggctcacttcaaggtccgcttcccgggttcacaccattctcctgcctcagcctcccgagcagctgggactgcaggcgcccgccaccacgcccggctaatgttttgtatttttagtagagacggagtttcactgtgttagccaggatggtctcgatctcctgacctcgtgatctgcccgcctcggcctcccaaagtgctgggattacaggcgtgagccaccatgcccggcctatcctaatatttttcttgttgaaaatagtcatgaacataattttagaaatttaataatctttcatgtgtgccattattgaaagagtggaatgaggttatttatgagacagtcagtacgttgaagtgtcaatgaagagattgtgattatgagcctgtggtcagctccctgatgacccaactcattttgtctcagttccaggaggcaaccctctggtgtggtgtgggttccattcagatcaagaggtgtcgggacagtttgccagggccacgagaagggggcaggtggtaactaggtagttggcttcagaagcagcggcacagggccctatgcttggtttaatgctctgtgctcaccatcttgaacttcttaatttttaacaaggtgcctgcattttcattttgcactaggctctgcaaactcagtagtggatccttactgtaagtgattcacttaaatgtctttggggtttcagctttcctcttccaaaggggctcactttgcctatcaatttttttttttttttttgagatggagtctcactctgtcacccaggctggagtgcagtggtgctattttggctcactacaaccttcgcctcctgggttcaagcgattctccttcctcagcctcccaagtagctgggattacaagtgcacgccaccacacctagctaatttttgtatttttagtagagatggggtttcaccatgttggccaggctggtctcgaactcctgacctcaggtgattcacccgccttggcctcccaaattgctgggattacaggcgtgagccactgtgcccggcccactttgcctatcttatggtactgttgcatgagataatactagagtgaaagcacttttgcaagttaacagcttaacccacacacaggagggcaatggttgtaaagcacattacaagtaccaagtacaaaaaagaaggatcactatggactccattgctccctccacctccccttcaactgccatggagttttccacacctcatcccacctccaccctgtgctccagccactttgctgatggtgcgttgtggtcagcttctgaggtcaggggacctgtgtgtctcgtctttgccccacccctcagtgctgagcacccctcacctgcaatgggggctcggtaactctcggtgaattagatttcttcagctggacaaatagcctccttaaagtctttaaacgcttcttgcttgacacctttacagttttatcccagaacacttgagctaggggaggccttggacactgagttcatcaatgtcatttcagcagtggagacccagggaggtggcgtgactggaaaatggcagggcctgggccggaactcaggtgtcccagctgactgtctttctcatgctttttccctttcatagactcttaagaatatttggaaatgtggtacagcaaatattagaggtttatcaagtatttctaaaagcaactacagacaaagggaaacgaagcacaaattttgaaatcgaatgtatagacagaccttaggggatgttaagttggtatgttgcaaataaataatacacattgtggctctaagtgtgagtctggttttttgtgttcactaggatttaattttaataacatcatgaattcacggcagttttgaaatagggctaatatactgttgtgaagttgacgacaactgcggtgtctttggtttctttttgaaatggctggagtgctggtggttaagttttatgctctcgtgtctgctttctcacttcctgttttaaaataaatgcttggttttacacggctttgtgcacacggaggagctagttctgattgatgtcattctttctattttaggagctcccagattcattgaaggagcagacacacctgagagaatggtacataagcaataccttgattcaaatcattcctacatatattcagttatttcaagcgatgagaattctggatctgccaaaaaaccaaatctcacatcttccagcagaaatcggtatgtcaacttagcaggggtcttcgggcctctggtgtgttaagcaggcagctgtcaggcaggtgacagacactgtgcagacaccgtgtttcctctccagcttccccaggaagtggttgggcagggccgtttggaggctccccagagctgcttgtttgcagcatccctttgggtggtgaggtcggcgtctcgcctgtataactcagcacacaggacacttgccaattgctcagaaaccagaagtttcatgagtgagcaatattttatttaggaactctgtgtttattttctttttgttttaaacctataaacgtgcagtatgcttattagaaatgtaatgtattgctcttatacattagtccattgataaatctagtttagcttatgttgtctttttttttcttttccttgagacggagtttcgctcttgttgccccagctggagtgcaatggcacaatctcggctcactgcaacctctgcctccctggttcaagtgattctcctgcctcagcctcccaagtagctagggttacagtcacgtgccaccagctgattttgtatttttttttttagtagagaaggggtttcaccatgttgaccaggctggtctcaaactcctgacctcaggtgctctgcctgcctcggcttcccaaagtgctgggattacaggcatgagccacagtaaccagcctgatgtctttttgatggatcaaaattttataattctcagtcattattcagttgtgttatcttaaaatgaaaatgacagtgatcattattgcttctctttttcctggggtgcaaggagtgaaggtctggagctgcatggagctccattcttacacatgtgccctgggaccagtggtttcgcatagttatgtgaaaatttaccagaagccaagaccctgtgggacaggtggcttgtggagcctctggtgttcatacatgtcttgctggctgtgtcaagactacaaggctctgaccaccctcttacccaggccgatcttggggatgcatatgcatgtactaaccttgagggatgaggagacacctgctcccaggcaaagagcagccttgctaaccacttgctgtaaaagtggtgggttccccaagctcagggttctcagctgtgatgtatatgtgcatagcatctatccaggccatctgcatcacgcttggtaaacttagctgtaagtgcaactcacatcagtatgctgtgttggaccaggagcctcgtgtcttctgtcggtatccatgaaacaggaataggcaaaatttattagcttctaagcagggtaaaatcaaattttagacccaacaaggataagtacttctgtttccttgcctagtttctggaaaggtagaaaggaccttagaatttctatgactgaaaagtaccatttttgacatgtaaggggtcatttacctcctgcccctttattttgcaaattggagagacccactgactgaatcattaactgactgaatcattatcatttacatattacactaaggaacttcttcagagcctgggctagaagccagatttcactatttgcaggtcatttttgggcaagctcatggtatatttaaataactggatagagtttctgaggactgagttacttttaaaaaccctttttaggctggaggcggtggctcatgcctggaatcccagcactttgggaggctgaggcaggcagatcacttgagcctaggagtttgagaccagcccgggcaacatggcaaaaccccatctctacaaaaagtaaaacattagccaggcatgatggcgtgtgcctgtgggaggatcgcttgagcccaggaggttgaggctgcagtgagcggtgatggcaccagccatcactccagcctgggtgacagggtgagaccctgtctcaaaacaaacaaacaaacaacccttttcaagtagaaaggttctgtccttatacatttgagaagccacagtggttgacctagactcagggatccttgccatcctgccaccttggcttgggaatccagtggttggcagcaagatagatggggtattaagcatggagctgtcaaaaggcagggcatcagagcatcaccatgggatgagtcatgctcacagttgtctgaaatgtcatcagaggtgctccatttaatatgtatctttgttcatctcttgaaatgtcttccttgaaattattgccagccagattaacacctgttcttttttaacttcccacactacaccaatgtactattcattctttccttgtgagccagtttgatttgagcagtggttttcaccctggctacaccttagaatcccccaaaaagccttaaaaatctaaacgcccaagatccactgcagaccaattccataggaatctctgggtacagggccaggaatcagcatttaacaaactccctacatgattcccatgtgcagccatggttgagaccactggtgggggagtgaggatgttatccttgcacactcggaggaggagaagagattggtgggtgaggggtatccgtgggggaccaatgtgggattgggacactatacttaatctctctgctcttcagtttcttcatccgtaaagtggggataatagttgttgctgtcatttagtggttgtgaggattagataaggcaataaacaccaacatattgggtacatagttgttattccaagcgattattcaagtgattattccaaggcactcgaatcctgttggagacatgatgtcatccccacagacctcattcatgtgcacgaaaactattcaaacattctagaaaggtgtaaaatgtaaaatcaagcctctcagtaagcgctaagtttcctgggtattcacactgtacatacactcatgctcttctatagacctacgttgtagctgtctatttataaacagacatgtaaccatgcatgttaaatatacttacacacatgggcttacactgtgttcttcagtctgtgcctcacatgtttcccccgatcacaccatgaaggcggaggtggactctaggatcaggctgcctgggtctttgacttactggaaggtaaccttgagcaagtcatttactcgttttcagtttcctcatctgtaaaatggggataacaatagtacctagttcaccgcgttgttgtgaggattaaatagataatacatagaaagcatttagagtaggtgaatccctggcattcactagccattattattattattgctattattagcatcatctttatgttaatgttatttttcagtatcagaacatctaaaccttccccattctccctagtagctgagtgatgattatggcatgatttatttaacttgttcccaaaatattttaaaattaaacttagtgaactgaagactgacctaagattctgaagacaaagatgttatctaactttgagtaacttgagcacatactttaattttttaaatcttagtattctcatttgtaggataaggggtcagaatgatctttaaaatatctgccacctctaaaattctctagttgaatttttttgtgagttaaactatgggaaggagggggacaataaatctcagaggctttaatactctctataccagatttaagtcatatatatattttatccaacttataattttcagtctatatcaaatcaacagaatataatttatccaaatacatccataacttaggcaaagacagacgattcccttctcacatggctgagacatatatcatatctccagtttggaaattcttatgacatgtgagtatcacaatttttcatcattatataggaaatcgtaagaaaagaacacaataataaaaagggagatgttcttagaatgatttaggtaaggttgtcaccctaattttcttctagtacttgcttcttgatactctgagttattaacatggagtattttgagcaaatcctcttttttaccaaacgtaagtattgagggcatctagaataaatcaattttcacatgtggggcaaaatgaaaagaaatgaaaatatattagttcagggcatgtttctctcctagaggagcagatatagctccttacaaactagggataaatgaagaaacactcagctgcaggatctgatgctcaagcatagtgaggaacgtgggaatgaacaaaggatttttagctcttttatgttgagcagctgaattttgtaaaggaggtggggtttgatctcttatcatattgtcttatagatctattgagggctgatgaaggggaggagtcagggaggtgtgattactagacagggtattctttttctcattattagagcagttatttttgacatttgacatcaaggaattaagaatgacaatgagtggtgctcttaacttctttgtgaaattcccaagaaattatcattatatggatttaaaatagctaattattggaattacagatgatccccagtttacaatggttagatgtaaggtttttcagctttttgatggtgtgaaagtggtgtgcatttagtagaaactgtactttgttcctagaagggtgcggctgctagaaagaaagaaagaaacaaagaaagaaagaaagaaagaaagaaagaaagaaagaaagaaagaaaggaaggaaggaaaagaaaagaaaagaaagaaaacaaaaaagaaaagagcagcactatttacaatagtaaagacttggaaccaacccaaatgcccatcaatgatagactggataaagaaaatgtggcacatatacaccatggaatactatgcagccataaaaaggaggagtttgtgtcctttgcagagacatggatgatgctggaagccatcattctcaccaaactaacacaaggaacagaaaaccaaacaccgcatgttctcactcacagtgggagttgaacaatgagaacacatggacacagggagggaacatcacacactgggcctgttgggggctggtggggcaaggggagggagaacattaggataaatacctaatgcatgtggggcttaaaacctagatgatgtgttgataggtgcagcaaaccaccatggcacacgtataccgatataagaaacctgcatgttctgcacatgtatcccagaactaaaagtaaaacaaaaaaaattaaaaaaaaaagaaaagaaaggaaggaaggaagaaaggaagggaaagaaagagaaagaaagaagaaagaaagaaagacaggcagagagagaaagaaaaagaaagaaagaaagaaacaaagaaagaaagaaagaaagaaaagagagggagggagggagggaaggaagaaggaaggaaggaaggaaggaaggaaggaaggaaggaaggaaggaaactgtgaatacctatacaaacattctgcttttcattttcagtgcagtagtctatttattacaggagacattcaacactttattataaaacaggctttatgttggatgattttgcccaactgtaggctaatgtaagtgttctcagcacatttaaggtaggctaggtgaagctacaatgtttgataggttaggtgtattaaatgcatttttgacttatgatattttcaacttatgatgggcttattgaggtgtaattccatcgtaagttagggagaatctgtatttaaacatttttactcaaatattgtaagatatggtaattccttaagctgctccttgggctctagaaaccaggagccgctatagacactgtgctccagttgcaattatcttccccttactggaaattaggtctgagggctttgggagaacagggagtaggtaggcagcttcatttcagttggaaaagatccctgggcatttcaagaaagaatagacaaatcagttatttaaaaatatgacacactgaaggcatgagccttaaaagttttgtttcagattctgtaatgttggacgcttatcacactgaaaaactctgtgatttccagaacctcggggtcatgatgctacaagataatgttcattagatacaccccccaaaacccaaatactaaattatgtttagttccttccccatcattatttacagagctgtttacttcttagttttgctttttgttcttaaaagaccttaaacgacctattcaatggatgttaactttttctgctgacaggttgtttgaagaacctgaaagaactcaatgtgggtttcaactatctgaagagcattcctccagaattgggagattgtgaaaatctagagagactggattgttctggaaatctagaattaatggagctgccctttgaagtaagagataaacatttctgtactacgattcacttttatttggtttatgacatagaatggtctataatatggcaagaagttttaacatatgaaatctatctttattatatcaccttttcctgacatttcaatcaccgtatactggtctttaaaaacttctttttttttgaggtggagtcttgctctgtcacccaggctgcagtgcagtggtgtgatctcagctcactgcaggttttgcctcctgggttcaagcaattctcctgcctcagcctcctgagtagctggttctgcaggtgcacaccaccacgtctggctaatttttgtatttttagtagaggtggggtttcactatgttggccaggctggtctctaactcctgacttcaggtgatccacctgccttggcctcccagagtcctgggattacaggtgtgagccaccgcacctgcccttctttaaaaacattttatactatgtcagaacccgaatttaagttcagaaatgctatcaaaggaaaaccaggcaaaatttcacacaagaaatttttatttaatgctttgcttgttgatgcttgtattataagatgcctgttgtctctaatgcagatcctgatttatttatccacaatggtaaaattgaaaataaaaggggtaaaattttttatatactcatagcaaaacttgtagatgattaaagtagtcctacagataggatttaagaaatccactaatttaaaaatattcattagtttcttttggtctgtattcatggacaaatgattttaaatcattttctgataaagtggagcacataaaagtgaacaatttttaatgccaaattaaactcaataagcatctcatgctggagcgagagaaggatctcacaatcctactggtaatgaatgggctaaaaatggtgattgctggtgacaaggcactggacaccgattgccatcctagaaggggcattattttcctttcctgaatgctgcagggtaggaggaagtggctgcttctaagctgttagcacccattccaccctaggagatgcacagcaggggtcctggtgagggtgcacagccaggggtcatggttccccgcacagatccactcatctcccagtcttttccagttcaggcaatggctcaatcttcacacagatgttaaggctggaagtaaattaagtcatcctctcttctcccatgtgccatatccaatccataaataaatcctgttgagcatgccctccagaatatattctgtctaaccgttctcatcaccttcccactgccaccctggtcaagacagtgttgtctgtcatctggaatggggcaacagcctccctgtttgcttctctgccccttcttctaccttttcctcctttattaaagtgtaatctacataccatatgactcacccattacaagtgtacagattcaaatttaggccttttccatcactcctcccccacccactacccccaattctctcttgctcctttgatatgaatccccattcccactcccaggactaggcaacatgggaggtggaggctgagatctctccactgcactccagcctgtgtgacagagtgaaacgccatctcaaaaaaaaaaaaaaaaatctaactataattgttgaattgtctctttgtccttttaattccatcagtttttacttcatatattttacgttgttagttgcatatacatttatgattcttgtatcttcctgacatacgtcaggggggctcctgctattgacccttttattattatgaaatgtccttctttatccttaacgatattatttcttaaatataatttgtctgatattaatatagtcactctaactctcttatagttatgttttacatgatgatatggtgatatggtttggctgcgtccccacccaaatctcatcttgaattgcagctcccataattcccacacgttgtgggagggacctggtgggaggtaattgaatcatgggagcaggtctttcttgtgctgttctcgtgagaataaatctcatgagatctggtggttttataaatgggagttcctctgcataagctctctttttgcctgctgccatgtaagacgtgccttcgcttctcctttgccttccaccatgattgtgattcctccccagcaatgtggacctatgaatccattaaacctcttttctttataaattacccagtattggttatgtcttttttttgtgtgcagtggcataatctcagctcactgcaacctccgctatccgggttcaagtaattctcctgcctcagcctcccaagtagttgggattacaggtgtgcaccagcacatctggttaatttttgtatttttagtagagacggggttttgccatggtgtccaggctggtcttgaacttctgggctcaagcaatctgtccacctcagcctcccaaagtgctagaattacaggcatgagcaaccacgcccagcttgcactgataatttatagcaatataaaatcctggaaggcagccgcagtgtattatttatcttaacttctctacgtgtgcacagtgaatgacacatctgaggtgcttcaaaatacatactgtattgatctgctttgcatatattcatagaaatgcctttggggaagaaatatccatcttaaaattattagttgaacttaattcccactcttataaaagtaattagaacattttgttattcatttctagttaagtaatttgaagcaagttacatttgtagatatctcagcaaacaagttttccagtgtcccaatctgtgtcctgcggatgtcgaatttgcagtggttggatatcagcagcaataacctgaccgacctgccgcaagatatagacaggtagctacttgcattctaaggtgaggtgtatgtattagttactaacgcttcaaacactgttaacatttgaaacatgtatagtacatgaatgttctttggaatcaactaattttccagagtttcctttccaggaaatcagtttccgaggaaattatagaataagacaatttccagtctgcatcatacatgtatgtgtttacgtgcatttgaacacctcttcattgtcctgatgaactttaatttgctttagtctccgtagaatggcaccattaactttccttcactctacagaagtggaaaagttaatttattaagtatagaatagaaacatatcactgtatgtttagaatatcaatgaggacaaattttattagtttcatttattgattcgttatacataaactttcaaacaaaattgatatgcttagccaggttttcaaattatattctttcaaattaaaaatgtacatatttttaaatttttattttttgttcagacagggtcttgctttgtttcccaggctggtctcaaactcctgggcacaagcaatccttctgccttggcctctcaaagttctgggattacaggcatgagccactgtgcctggcccaaattatattcttgcagctatttcatgttttttaaaataagaattatcatgtaagtttcagtcattcacttatattattagactcctgtatggcaagcctagagaacgggatgggtttaaagtggtaaatgaaacacaatctctggcatcctggaatctacaatttttttttttttttgagacagagtcccgttagctgcccaggctggagtgcagtagtgcagtcatggctcactgcagccttgactgcttgggcttaagcaattccctcacctcagcctcccaggtagctggggccacagatgtgtgccatcatgcctggctacttttttaaaataattatttgtagagacaaggtcttgctatattacccaggctggtcttgaattcctggactcaagcaatcctcctgcctcagcctcccaaagtgctgggatttcaggcatgagccaccgtgcctggcctacaatcttttttataaagaaacacaagcaagctatgatgacacagaggccagcaatggcttaggcctgaatgccatcttgtatgacttttttttattcctggtacatgtgatgtgtattgatgctttctaggcttttgaggctaagagggaatcttttagtttgcaacatgggaactttatgaaatatttgtatgataatccaaagttttggaaataaatgaaagaaaaattcccagggggaggccactgagttagaataaaatggaaaacagaataagacatatttggaacatattttgctcatttacttttcactccgcagttgccttcctgttttaaagttggaagacgtaatgagagaaggataataactggggtttaaagatatacaagaggaggctgggcacagtggctcttgcctgtaatactagcactttgggaggccaaggaaggaggattgcttaaagctaggagttcaagacaaggctaggccacatagtgagaccccgtctttctcattaaaaaaaaaaaaaagtgtaccaaaggaagtacattgctaaaatctgtttattctcatttcaattctagtatgattgccttcccatgctctgttaacccttgtaaatgcagtagactctcggaagggacatactgatgtttgaggctccatcatggcctagtgtgtattgtgcagtatgcttatcccgctgctatagctgtgtcttcaactggtgattaagtcagtaaaaacttccaaaaaatcacgtcacctggcatgactttagttacttaaaacttaggcagagcatagtggcttatgcctgtaatctcaacactttgggaggctgaggtgggcagactgcttgagcccaggagttcaagaccagcctgggcactatggcaagaccctctgtctctacaaaaaataattagccgggcatgatggcgtgtgcctgtagtcctagttactcaggaaggagtctgaggtgggaggatcatttgagcccaggaagttgaggctgcagtgagccgagattgtaccactgcactccaacctgggcaacataataacaccttgtctcaaaaaaaaaaacgaagaacaaaacttagaataagttggttctcataaaggtcacatgtataaaataaagtagggacttcctgttagaatttatttgtaattcatgttggttttcttagctatgatgctaagtccagtgctatgattgtttttacctcttcttaggctagaggagctgcagagctttctcttgtataaaaacaagttgacctaccttccctattccatgctgaacctgaagaagctcactctgttagtcgtcagtggggaccatttggtggagctcccaactgccctttgtgactcatccacacctttaaagtgagtagcccggaaatcccagtagacacactcagacacaggtaaggagtgagaagtaccagagcctgggcagctgtctcaagacccggattagatggctctcgtactctgagaacctgatcccaactcacagaagttctggtgactttttacaggattttggagtttgtggcatatgacacgaggaagaggcatagggttcagaggatttctgcacaaatgcatgctggttgatggtgttgcgggacatatgtccagggcctgtgatctcttgctcagtgctcacatcgctgctggcctggaggggtcagcagatgttgaaaggaccctccctggttgcttcacccttctttaggtttccttaagtgaacctataaaccacccacaactaagaaaaaccatccatgcaaatgtactccaaacagcctccaatctggggatgtggaagtggaattgaaaagtcctggctccgccctcccctgaaatgactccaaggcagctgatggctccctggcagcacatcctcccagaatctggagctttggggttgccccattaattctacctgagaccatttttgtccatccctagcggtttgggccctccccacattattcacacgaggctgctctattaagagccaccttctctctgtccagagacctattggccttgagcaccaggtggctgttaacgcaaccactagcgagaatatttccccaggactcctagttcttcagtggtaagtgcttactatcagcagagttcaatcttgtcttcctgtccttgcaataaatgcatggcaaacaaataaagaggtttgactgctggaaagaaagagaacaactccatatctgtataagcacaaaataaacagggtgtaagacatctcacgcatgccctactctgctccttccactagaataggtcttccactgtgcttggctgtgtgtggaatattgtttgaataagaagaggaccactggtgagaggggtagcaggactcctccctagagccccttccacatccagcccctggaagcaggcttggcagcttcatgtctcatagcagtcagggtaaacctgtcacctaactaaagtaatttcaaatgatataattgtaggactcagaaatctaagagagtcagatggaagctctttgaattattgaaatttcaataaaaagaatagatacaggtttgcataaatatttaatagcttactgattcttagaaataacctgtagaagttcaagaccagcctggccaacaaggtgaaaccccgtctctactaaaaatacaaaaaattaactgggcacagtgacgggcacctgtaatccccgctactcaggaggctgaggcaggagaatcgcttgaaaccgggaggcggaatttgcaataagccgaggttgcgccactgcactacagcctggcgacagagctagactccatcaaaaaaagaaaaaaaaagaaacaagaaaaaaaggaaataacctgtagaaaaatagtggaagaaatgatgacattaataataataaccaaaaatctaaaatatctaggaaaacctctagtgaaaatagtcctcttacatgaatagtattaaacagtcttcccaaaaaataataaagaagtcttgaatatttgaaaaaggtataatgtatcttttctgggtgaaaaggcggtaaagatgtgatttcttccaaaaattatacttaagtgtaatataattccaatcataactctaatggaatttcttttttggagcttgaaaaatgcatttgacagtatatgtggaaggacaaagctaaggacagtaataataattttagaaaacaagagtagtgtgacagaacttgccttatcaaggattatagtgtggccaggcacagtggctcatgcctgtaacctaaccctttgtgagggtgaggcaggaggattgctttagctcaggagttcgagatcggtgtgggtaacatagcgagatactgtctctacaaaaaattaagaaattagccaggcatggtgatatgcccctgtagtcctaggtacttgggaggctgaggcaggaggattgcttgagcccaggagttcgatgttacagtgagtcatgatttcactgctgcattccaacctgagcaacacagcaagaccctgtctaaaaaaaagaaaaaaaggcctggcatggtggcatgtgcctgtagtcccagctacctgggtggctgaggtgcaagggtcgcttgagcttgggaggtcgaggctgcagtgagccatgattgtgtaccactgcactgcagcctggatgatagagcaagactctatctaaaaaaaaaaaaaaaaaaagaaaaaaaaagaattacagtacatttagaaggggtgacctcaaaatgatgcaatgctgggcaatgatttataggtgagttattggaagagaataggtagtcctgaaatcaatgctaatacatgatataggaattttcataagcaactggggaaagtatgaatgacttcatatggtatgaagaaactggctagtgataaagcctgttcttcactttatagcataagaaatcttggagtactacatcgctatatatgccatatatagttaatatcacaaatatatggtatacatagcatatagaaagaaaactagaccaagagacaagttaaatataaaaagaaagttattaaaagaataagaaatgccatgttaatcatgatggcttgatcccttttaacacttatacacttatcctttataacagcctattaaaatgaaagaaaaaatttaaaatatgagaaatctcaacatttttatgagatacatcaagtagacagaatagcagtcattgatgaaagtaaggtggaacaaaccaaatcccagagaacaagccgaggagcgcaccgctctgtcctgaagatgttggtggccagaaatttcggtacagggaggtgtagacagaaatatggtgcttaaaacaagaggaaaaacggaagaatttttatatcaacaggcaccccccaacctcctccttaattacaatgggcagaccactctgtaccagcagtccaggctccagaccaaaagcctgagattttctctaaggtagcctggagaaaagaccccagagttctgtgtttggcgactgccctgaggacctgctagccctgtgcttgagtgatcacccacagtgaggccggtaccttggccagcactgcctacatactcaggggaccagccaaattctgctgtctcattctcagatatgaaggcattaccaagccttaccagatggttgtcacaaaaacgtaaatattatttattgattttcaattttagaatcaaactgcaggcaaaagaaaagtgagatgtgattacacaaaaatgtaaatattatttattgattttcaattttagaatcaagctgcaggcaaaagaaaagtgagatgtgattacacatcagaatgtgtatagtattaaccttaacaaagtaaaagtacacaatgtctgtgattgtgctttgagatacatcaaaaaaaatgagatgtccgacgtgtggttagatgggtggatagatgtgtgaacagatgggtgggtagatgggtggatagatgggtggacagatgggtggatggatggttggataaatgggtggataaatgggtggatagatggatggatagatggatggatagatgggtagatggatgggtagatggatgggtggatggatgggtggatagatgggtggatagttgggcagataggtgtgtggacagatgagtggatatgtgttaaagcaagtatagcaaaatgttaaacatggaatctaggggattgtacatgggtgttcactatgaacttttttctacttttgtgaatatttaagaattttcataataaaatgtttaaaaagtaaaatagtaggtaaaaatttggaagtgggaaggttgggaaactggaaagaaggggagaaataccaccacttgattgaatgacaggaaagtatttgtcctaaggtaaaaggtattttaaatagattaaggaaaaacagtgatagaccaatgaaaaaagattgcttctgggatctgaagagtaattaaagggagggtgagagactattgcttcacaaagaagcacgattacattctgcaggtttaaaaatgtgtacaatgattacttgattaaaaatgttaagaatgataaaatgtaggtatatttcttatttttgaatagggaaggatgataaacattaactcaatgaaaaaattataaaggaaaagttgaatggttctatctacattaaacattacaacttttaaactctctccatgttcagacattaaataaaattaaaaggaaaatgaagtgggaaatatatatatataataaaacaacactcgtggctcatatcttccatatatacagctctcatctataatccaatgagaacacgctaacatctcaagacagcagggcctgcaattgcaaccaaaaactatttaagagatttactgttttgaattgaaataattacaatatttttcacatcaatacatctttgaaaattgtgaagacagaagatcaaataccatttgggtttcccccctttagcttgtgtgtgtgtgtgtgtgtgtgtgtgtgtgtgtgtgtgtgtgtgtgtgttagcagtagttcatcttttatttaattttattcttatattttcagagatgggatctctctcattctattgcccaggctagagtgcagtagtgtcgtcatagctcactggagccttgacttcctgggactaaaccatcttcttgcctcagcctgccgagtagctgggattacaggcatgtgccaccacactcagctaatcttttatatttcttgtagagatggagtctctctatgttgcccaggctggtctccaactcctggcctcaagcatatcctcctgccttggcttcctaaaatgctgagattataggcatgagcctctgttcctgtcctatcgtttgtttatttatttatttatttatttatttatttatttatttatttttgagattgagtctcgctctgttgcccagactagagtgccatggcgggatttcagctcactgcaacctctgcctcctgggttcaagcaattctcctgcctcagcctcctgagtagctgggattataggcgcctgccaccacacccagctaatttttgtatttttagtagagacagggtttcaccatgttgtttaggctggtcttgaactcctgacctcaggtgatccacccgcctcagcctcccaaagtgctgggattacaggagtgagccactgtgcccagccatgtcctatcttttaaatacacattttgtggggattttccttgagtcctttgtaatttggacacgtcattttaaagttggatgtcccttactgggagtaacatcaaacattgcatgacgacatgcagctgtgaggatctgcctgagaggaggtgttagtgtccactccatggcctcctgtactctctgcctatgactagggagctctcatttccccatcaggcctctgaaaagtctatactttaaaactggctctatattactgttggattattccacactggaattccactggtgatgctgatatcatgtggtcaaatgtgacttttaaaggtaagccagaacttgggataacagaggttattttatgtgaggaattttgcagtttaaaacgcacaggtgataatgtgatacttcccatgctttctcgaatagatttgtaagccttatggacaatcctattgataatgcccaatgtgaagatggcaatgaaataatggaaagtgaacgggatcgccaacattttgataaagaagttatgaaagcctatattgaagaccttaaagaaagaggtgggttactcatatttaaaattatttaaaattagtgtacagacgtccacttatgtaatacatttgttaatagaagtcaaattgacaaaaagtttattggttgaggggcacgttacttcgtaaattatttttccatttaccctccaacacactccaaatgatacatttccttaaaatatcaaattgtgctagtccatttgaatgcttgatgaatcatccactgtttgacagagaggctgggaaacgtgcacttaaaatgttagggttgcgttactaaccatacgtgagtttttaactaaacgatattgacaaaatagtatcctaagttactagaaaaataagatgtcgtttcaaaatccgtttacattcaacttttgaaaaagttatctcacataaatcaagaacacatataaaaatcacaaaagggaaagcacaggatggccaatttgcgcatagatgcatttagttttggttcccatagggtggtgagaatacagaggggcgaggggggtcaagtacctcaggaaagggtgggaaggctttttcccagcgccagattccggcggctgtttccaaaggagtggagagatcctaatggtgttctggaagccttaagcccttccttccatcacaagacagcttccccaggaaaaaggcatacatcagtctttggtcttctaatcactgcctcctttctgggtgtggatgcctgagagtcattccttaatttttcagttctttgatgagctaggtgcagacctggcaggaagagagttgtcccacaagtggatttagggaggaagcgcactggccctgggcctctgatgatgagcatctgtgggcaggctccctcagccaccctcagaaaatggcatgcgtgagcatgcccctccctcatcagtagatgtctgaagacgattagtcacattcagatagtcagaaatgatgaaaagtgtcatttattgggcaaattaaaaattgtttcagctaaactaaaatttctatatggttacttttaatctttttggatatccctaattttgaattctgaactaatatgaaataaattagaaatttatcgtaaatgtgaaactgaaattacagagccatttatttgtcaaaatttacctttgggttctatggttttcctcttgtgagagcctttagtgttccattttattcatttatttattcgtaattatattgtagtgctattatgtaaaactccaagaaagaaagaaaataggtgttaagttctggatctatgtggccagcaataataatttgcttttaaaattaatcaatttaaataaaataaatatatttatctattataaaatatcatttaataaatatattatttaatattaattttatcgataatatattattagttattatttacttaaataaattaatttgttttaaaataatttgcttttaaaaattaactttagagatgatagatttttaatttgtttacttatttctaaataataataattttattctgtatatattcatatgtattagattgaacacatgatattgctaatattcagctggttttgtcctacagaaatgacactttttaatgtttcgacctagatatggtcaggcatgtgctctgaattttaaaaaatttgctcgttttcttttctttatcatggtgtcttccctgttttccttctttccccatcagaccaatgtctgagtgaaaaaatagtagatttaatctgcccacaagggcctacaactttgtgtgattcaagaaggataaggatgtgaagccctcactggtcctcaagctttagtgaacataggaatgagagtttttactcatcaggcctggggcagggcctgagaaagtacacttctgaccagctcgctggtgatgttgatgccttgtgtctgagaagtacactttgagagccattggtatagaccatcctttgacaaaactttggctgtgaagggagagagaagaggggtcagcaactagtgggaagagccaggctgagagaaggtttactttcaaagatggtgtatggtttaggaacagcccaaacttctcttataaacggtaccctctgccacctactagccacagtcccaagtccgtgaccatctatttctattttgtcaactattaatactgtagggtcatatagcttccaagatcttgatgtagctgtgagttggctggaaagatggcaaaagaatgaaagttaacgattcttagatctaaacatttctaaagtttgactgcacatttgtgatgacttacttaatggtgacaaatgcattatttatcacctatacagtatctctatacttaaaacatgaagtgacaataatgggtgtattgacatacattcattatgtatgtcatagcacgtagctagatttcataataaaatggtgaatgattgagcatacttttttctttctgttacagaatctgttcccagctataccaccaaagtgtcttttagccttcaactttgatatccatcagaagactgcaaatctcactattctctggagctatatataaatctttgttatgatcatgtcatataggaagaatggcttgtgcttaaggacaaagtctagaaaccactatcatagttgctaaaaaaaatggttttcaaatgtcaaatacatgagtatctccctccatggactggagaattgaaaaattggtttgtatattgatatttccaggttcatttgcatatacttttttccaaataatgcacatttaatatgttttaaaatgtcttatttttaagaattataactaaaagaccaaatactgaagttaagtgcattgttttcaggaatcaaaagataaaggggccgggtgtggtggctcacacctgtaatcccagcactttgggaggccgaagtgggtggatcacctgaggtccggagttcgaggctggtttggccagcatggcgaaaccccatctctactaaaaatacaaaaaattagctgggcatggtggcagttgcctgtaatcctagctactcaggaggctgaggcaggagaatcgcttgaacctgggaggtggagttgcagtgagccgagatcatgcgactgcactccagcctgggtgacagagccagactctgtctcaaaaaaaaaaaaaaagaaaagaaaaagataaagggattgtgaaaagagcatttatattggactaatcagatgagagtgttttgttattttgaaagagtttcttttactgagaataatcttccttgagtttatataaactgctatttccatatgttttaagttatattttggcaagtgtagactcccaggagagacttgtaggtacaatctaggccttgaagaaacaaaggctggaatatctgcccatgctttgggcatgagatgctcagatggtgcgtgggtagatctagttgaggaagtgtgggcctggctgttcatgggaagtcttcagtggccttcatggatggccatccagtcctgagtggtcaccctgggggtcctgggacacacctcagtaaagagcaaaggcaacgccctcagggtcccttcctccaagatggccatgtagggtaatggagatgaccagtccacactgataaggagttcctagcaaggcttccttgtgggtaccacaggacaactctgcccatagcaaagatgcttcagtccagagggagcccatgggctgtttgaatttgggagaggtgggattcattacaagactttgggctcttatgtcacatcacatgatttggagaaattagacacaatctcttatttttataccactgtcttgggctaaaataaacaggttgtggctgatggtgttgaagataaataagcttaaacaaataactttggccgggcacggtggctcacacctataatcccagcactatgggaggctgaggcaagcaggttgtttgagcccaggaatttgagaacaggattttgagaacagcttggacatcatgacgaaaccccatctccacaaaaaaattcaaaaaattagccaggtgtggtggcatgtgcctgtggtcccagctactcaggaggctgaggtgggaaaatcacttgagcccaggaggtcgaggctgcagtgtgctgtgattgtgacactgccctccagcctgggtgacagagtgagaccctgtctcaaaagcaaaacaaacagcaataacaatattattattgttataactaaaaaaaaaaaaacaaaaacaagcagcttttgtgactaagaaggaaaatatgcatatagtggcatatttttatatgaatcatctcctctgtggtcttgcccagtaccatccagtggagctttctgcagtgacggaaatgttctgtatttgcgttgtccaacgtggtaaaccagacacatgtgattcttgagcacttgaacaatgactgatgtgattgaagaacccatctttcaattcaattaaatttaaatagccacatttaactccagccttgggtttgacctgatggaaaattcccatgagagagtgctccaaaccgttccaaggtggggccagttgcgattctaaaggaagaagcactaaatggcagggtgatcagtccaaagcatttatgaggggagcttacatacagcatgggctgcagcgtccttgtgatgggcagtgagacaagggatgttctacctgggcatgtccccagcgagggggttgggggatggagttcacatgaagatgtaaggaatttgggtgggggctgggctggcttctacatgtttagcaacacggctgatctttcagtgtttccagcaacaacctaagcaccgttatcagtgcctaggaatgttcaaggcccaggctggggttcagacctgcagaggaaaacatcagctggctgggtcaaggcaccatgtgttacttggtcaggacagagacaaaaatgaggaaaactaggggaccccacacacatgtggctaccatactcctgaacaggtctagctagttatttgtttttttggaagttaatctggggtagaaatgtatggtgatttttattttctctgtctgaagaaccagccatttttaaaaaggttattattgacatcccaatattttgtcttggtgggcttactcataagtccaaacattttattctcaacaggtgtaaaacaggcagagcattctaaaaccacatggtagtgctttggtggaggactgcttccacttagaaacaaactctgagaagtaggctaagagaagacaagagggccgggcgcggtgactcacgcctataatcccagcactttgggaggccgagatgggtgaatcatgaggtcaggagttcgagaccagcctaaacaacatagtgaaaccctgtctctattaaaaatgcaaaaaattagccgggcgtggtgggcacccgtaatcccagctactcaggaggctgaggcaggagaattgcttgaacccaggaagcagaggttgcagtaagctgagatcccaccattgcactccagcctgggcaacagagtgagactccatctcaaaaaaaaaaaaaaaaaaaaaaaaagagagagagatgaaaagagtaggaaaatgagaaatcaccttcgttgaatcttaaatagttacatttttttctttttaacactaaaaatacaattcaaatttattagctctactacttgaatgattttggaattttatgtcatgctaaggtatgtgttacatatggccaagtggaaaatatatctgaagaggggctttcatacaaatagactgttcataatttatgtaaattttattttaataaaatcagttttttgtttaaaaaccttgtttcactgtcacatatgaaaaaaatactgcattgatatataattatttcatgttacataataacccaaaacaaataattacttgaatatgtttgtagagatactatttaatttattcatataaatgtgcagaaagattccaaaggagaatatatatcttgtgaaaatatggagatttgaaaatttgacatgatgcaaatagactgatacataatttggaaaggttatttacatggcagaatacatgtatgaatattaaagt

SEQ ID NO: 299 - DNA, 124091 bp, Homo sapiens
gtttcttatgcagaaagtgctgagcaacggacagactgaagaggttaggtctggatccaggtaaaccctttatgaggctaacgcactagctgaatgagggatgacagcatcccacctagacaggtgcagacagattcccgaggttcaggttcggacttcagtttctccgctggaacgctgagggtggggcagcacccgggtccctgccctgcaaacggggccgctgcagggttcctttggcggggccggtgccccggggagcgcgcaggacgcgcccgccttcagccgggggccagggcgagcgggacggggcgggcccgcgggtgccctgaccagctcaccgcccaatcgctgcgggcccgccgagccccggggggctggggccgccgccgccgccgccagaacgtgccgcggctgcgccaacgcgcgaacgccgggcagggcggcgggcgcgctcagtctggcggcggctgccgtgagctgactgacgttccgggaacgccgcagcagcccgcgccgcccgcagcctagccgagccgcgccgcccgggcctcgcccgcccgcctgcccgccatggtgtcatggatcatctccaggctggtggtgtaagtggccttctcccccgcgcccctccgtcccctccctccccgcccccggccccgggctgcgcgcgcccctacagcgcccggtcccagtggctcgggctattaatacccggcgcagctaaatttagcaggtacagtagccgccgaggacgcctgcgggcggacgggcggcgcaggacgcggctgctgcccaggaggcagccggcgccggcggccgcttgcggggggctgggccgggacggcgagggctggggcgctcgggggttccgtgggggctgcgtctcgccgcgcgctggccgctttgttcctcagctcggtcgatttgcagaggccccgaatgggcgcaccgcggacacgcgtctctctcctttggcagaaatgtgaggtcgcccggcgccgcgccccgccgccccagcttttgtcaggtggaaaggacagcgcagacgaaccaggggcgctgcctggagggtcagcgcggaacgggtggagaggcagaggcggggctcccagtggggttggaaaaatcctcctttttaggtgtctgcatcgacagcggcaaaggcagctgggacatgggaagacgcatgtgaatcttggagtaaacgcctggagcccccggctccgactccttttgcaggggattgagagacaggggcaggtacctccaggaatgcacgggaaattttcaagtgacagccacccgcatggtggcgatgacacctcccaggccttgcaggagagcgcagagtcatctagggtgaggtctgtgtgaagtcattgggggtgggcgtgggggccgattttctccttcaagccccaggacctgtaggcgtttgaagagcttccccggtggatttattctcctttggagatagacgtggctgttccaagtccctgttcttccctaaccatcctggcctgagtcagaacagatttgccacctgctgtagctagcaggggctgaaatgggtgtggggagtctaaggcggggaggagggtggcaggcacctcgggctttttctttgtctgagaacacggggctctggaccccagtgattgtgcaccatcactccccacgttttgaaacaccacccatctcccttcccttctttactgattttcccttccgaagtggatctcagcattgtctcccgccaccattcagggctttcctcccaaagccagtgtctgtgcctctcagcccccaagtcattccgtgaaggcctctccacagctgttcctgactgcggggtgtttgcgctgcaccttgaggtggcatgttaaatatttagaagatttctgctggcagagccgacatgaataatacaggaaagtggctgacacgccttgcccagcctcatgcctgaccaacactgtcttgccttcagggtggtgtttcctctctgggatcgatattgccagtggcttctgggaagccctcagggtggggctggagagttgagctggcctggctggtgggctctctgtaggtcctgctgggctgggagtgagggcatctgatcctgggtcatgtgactatcattagttttattagcactgggtcatgtgactatcattagttttattagcacctccctcacccctgccctttttttttttttttttttgagaccgagtctcgctctgtcgcccaggctggagagtgcagtggcacagtctcggctcactgaagcctccgcctcctgggttcaagcgattctcctgcctcagcctcccgagtagctgggattacaagcgcctgccaccacgcccagctaatttttgtatttttagtagagacggggtttcaccatgttggccagcctggtcttgaactcctgacctagtgatccgcccgcttcggcctcccaaagttctgggattacaggcgtgagctaccacgcccggctcctcccccttttttacaatgagcaactgatgggggtggagaggagaggcatatatttgggaggtgtctcagggatgtgctgttgctttctaaaacaaccacactccctagaaccgagacttcagagaatttaaatgaacagcattatgtggcccaaggagagttgatgggatttgggattgttacttccactatcaagtccaaaaggtcagggataccacttatcccccagtccctaattccctgtagaaacctagcataagcatattgattatgagttatgaacatcatttttaataagcaatacctgtttcatgaagacaatatttgttaattacaggaaaattagaaaagataaactgaaaatcatccacatttccaccacacagagataactaataataatgatggagggcatattcttcaagaaattttcctgtattgcatatatgtacatatatttgtaattcaaggatattattgattcagcccaatattctacactccacataccttgaggaacttcttatcaaggggaggaatactgtgtttggagtcagaacgcccatggttcaaatcccagttttgcctcttgccagaagatcccagttcacaactcagatcagagcagatgctagtccacagctagttaacctcatgttgctgttgcaaagatttccatgacacttgatatataaattgccaagcaccacggagagcactaaatcaatgatgagtccctccttctgtcctccccgggaaccctatgagaggggctctcagacttaatttactcctgtggttttcaaactgggttccctgagggccacccagcctgagcagatgggctctgggctcctcatccctgattcaacccaagcagttccctttttgtttgtcttatatattggggttctagataaaatacaattcagaaaaatatatgtgttttactgctaataaaaacaactgatctagtcctccccctcatctgtaaaactgcagaggaaatatgccttgctcagggacacaagatgagctggtgaagaaaacaggctctggatttttagtccagtccagtgctttttccaccttcactccccactgagaaaaacatctctttcaagctccctagacctctggtatgggagcatcctatggttttatccgcgagtcacgttttgtataagtaatcttttcatggttttgtaagcctctgtcacatcaaagaacatgtaaggaagacctatcactgtgttgtgaggatagagagggagtgtcttcctgtctttgtgtggtcccaaccatccgaccagaggtatcacaacaagctgatggcctccagggacagccagccagtgctcgtggttgtctctgctgctactggccgtgagcattttgaagaaagcaattgtggcttgtttccctttacaaccgctttatccctgccatgggtctttcacaaagtatctggcacctgaatgcactgagtgaaggttggttgtgttgaaggaaatcctaggccctggggacaagcagagtggctggctactgctgtcccctggggacggaggtcagcaggcatcaagacaggcttgtgcccacgggcaaggctcttagagtgaggaccagtttgagatgcttatttcttgccagctctctttctcctaacttccttggctcagcctgtaaagaattaaggaagagatactcagtgcaatagcactcagaaccaggttgataccttcatgggacacaggggcttatttaggacttgcctgcttgcctcctttcattttctttacatacaactcaaggcctaggcatgaatgaatttcaaactggggagagcatgtttttgtgcacccttttggaggggggataccaacgttgctctgtgacttcttggaagaatatgccattttgaagcattattctaaggagcaggtattgcctcattgtcttggccaaggcccagaatgttggctgaacggatcaagagcttctcaccccttatgggattagtagactaaaaccccagctcactacatgggggaaagagagttctaagtccacagaattttctgaataactaatggctgtgcagaaaacattttatttccacattgcacattttaaaaaatactagtttttagaaaatacagtgtgatgatcaagacagagtcttagtttgatggctgaagatctggctaagttccaggactgggatttggagcatgaagtctgtcctgggtcagggatgtgcaaatggatggagctgggaggaatgtggattgtcctcaagatgttccccaactgttgcaaaacaaatggaaaaaaaagaaaatatcgtaaatccttaaatataagctagcttttctttggggcctgcttttaaaatgtggcatgcaggaaactgattcagttaatggagggttccagttggttgaggattgatttcctggcactgtgctgtagtacactgtgggagctgggtaaatgtttcggttgaattgtgaaaggaaagatgttaggctagtaggcagcagacatgggttctagtcccagtgctggtctgactcactatcacagtcctaagggcaactcccacccacctgggccagctccctgtctaagagacaggtttttggccacagtcaccttgcaggtcctaagagctccaagagtcagtgttcctctaggtcccttccttccccagctggcctgtatgcatcacatttatttataaacaggaggagtatcctcaaggaagtgaaaaatactagcttagatttctccgctgttgagctgccctgtttctttgtttgctaatcctgcctgtctgctgagaagtagctttcatgcacttcttcccactgtgtcttatttgaggttagctgacaagtgagggtctcacctagttattactgggtcagtctccccacttccttctgaagcccgctatcttttttggagggtgtattatgtcgggggaggaggagccctggggagaatgagggaagggggactcaggtcctctttggccatttagtgaggctgctgttttgtgtacgtatgagtgtatgtgagtgaacgtgtgtgtgtgtgtgtgtgtgtgtgtgtgtgtgtgtgtttccaggaaagttagggaggctagggaaaggagagatatggcagtgcagcagccatagcacgtggcacctttagaatttcactgccagggatgagccacacacatgcccagctggttaccagaattcttagtctgggggagtttttccaacccccgaaaagaagtaaggagaggggggtgcacttgggcactaaggatgttctcctctcgattctgggccttgggaagggaattgggattcttgaggaactggaagttggatcattatattcagagtatttattctgaattttcagatctcatctgtctttatacagaagcacattattttcactttgggatttttaagtcacactggggcttccctgggaatacagggaaaaaggaaatatagatcaaggaccaactattgggcacacagtagggatttcagaaggaatcttgaaaggtaatttggtataggccttcaagcatgcgtgggtacccagaccaggatggcaagtgaggctgcctaggacactgtcttgaggagcaagaagctgagttaggctcagtggggaaggagtcccaagagtgctttatgcagggaagatggcaatggggcacatgggttggttcagtatttgctcttccacacttagctcattcctgatcagaaaaggtctgccccattgtcagatttactagattagtaaacagagagcatctgttatttgagttaacatctcctcctgacatcctatctctccctctccccgtggccttgtcagtcacctggcagttctaggacaaaggtgcctcctgttcccactctaggtagctgtccagcctagaggctgtcttgccctgcttctctttcctcttaggactatcctgcgtatctatactacattccccgcccccccaccttttttttttcctttcactgatcacagctcaaagtctgccttaggcattctcctgcatacttaggtgtgtatatcctttccccctctttgtaggggactctggatagtactttgggctgcaaaactagttttccattcccttctggtagcatgctgcatcctgcctcccttcactcagccacagaagtcagcatgtgacccaggcctagatatgcatttccctgggcacagacattggtccagaggtgggcaggtgacccaaactgagatccttccccagggtttcttgatttggagctgagggagaatagccttgcctatgggttccagagttgggaagatatgaagttagggctgaggcatctaaagcccctggcatacgtggagaaagtccataagtaaaagtgaagaatacaacaaagcaaaaataaatggagatgagacttgggtgagagaaagaggctggcacaagagaatcttggttctggttgctcgggccccagttcctgcagctgcttttttgatgccatgaactgtccgatatcctagaatgaaaactttaaatgctgcttataatccattaaatatttgttgttcggatggactggggtatgctgcaggaacaactcccaaatcccagtggctcaagaaaacaaaggtttatttcttgctttctgctgcctgttactgtgggttggcaggggtactctgctcatcgcattcactgagagtcccaggctgactggatttcctttgtcttatcgttataagacatcaggattctggctgggcacggtggctgaccgtgtaatcccagcactttgggaggcagaggtggacagatcacttgagcccaggaatttgagaccagcctgggcaacatggcaaaaccccatctctacaaaaaaaatacaaaaattagctgggcatggtggtgtgcacctgtggtcccagctacttggaggatgaggtgggaggatcacttgagcctgggagctggaggttgcagtgagccgagatcatgccactgcactgagcctgagcaacagagtgagaccctgtcttaacacacacacacacacacacacacacacacacacacacacacacacaccaggattcactgtggtagggagagtcacatactagctcataagtacctgcacctggagatgataacatgccatttctgctcacatgtcattggccaaacctgaattcaagtggttacactcctcactaaagaacagccctaatgaccagcatatatgttgaatgaatgactcctaaccagctttgcaaacctagaaatgtccttggcataatatggtattgtgcaactgggagaatcctgacatactccttcaatctctacactagaaatatctttctcacttcccttttagtccctttattctgttcgtgagtcaagaaaggaggtcttaagtctgaggagaaattagcaattacaaagaaccgatgccattccatagctaaagccttggaaggtgccctctggctttcactacactctccatacatgtctctacctttctccatgaagcctctcctaggtcccctaaccaagaaagatttctgtcctctgggtctccagagtggcattgtcactttgttcctggtgctatagtggtctgtgcgttgatatccccttacagaccacatctgcttcgtctcccttatagtttctcatatgcagtaggtgcccagcgagtgcgtgttgggtggtgaatgagtcaggacctcactcctcagagtgtggtctgtgcaccagcagcattggcattactggaatagttaggaatgcagagtcccaggcctggtgaatctgcattttaacaagatccccataaagcctgagaagggctgagtcaggagacagggtgccatcatgtcccctgtgaattgaaaagagatggacttgcctgaggttttcattattgtctgtggaccttggacctgggattcaattgcaagccaccatttgtgctagactgtcattcatgctttctggttctgagaggttctgaccccaagtttttatgatgagttctaaatagcatatctagactctgtcaacccagtgcccagccaagaaccttttgatatggacaggaggcagggaaacactggatagaagagggcagttccctggcaaaggccccaccctcaagcctggaaactgcggccctaaatgagaacagttatccctgttttcctgcccaaatattgctttttccaaaaccactctggctcgccacaccccgcatcctgtatccataaaaaccccaaactccactggcagagaagcagagtggcatggcagaggagagaagagaagcatctgaacgttgagaggagtttggccagggatggccgcactccaggggaagattatcttcccactgtatcccctttccagctccccatctcactgagaaccacctccatcactcaataaaatctctgcattcaccatccttcaagtctgtgtgacctgattcttccaggatgccgggttcttcctggaacccgggtaccaagagggcagggtataaaagactgtcaccctgactctccactgagctggttaacagccatctgcagacggcaactgctaaaacagcattaattgtaacacacccctagacgctgccacgggaccagagcccaaaagtgctcaccccagccctggcacctgctcacctgcatgcttcccctcctgcaaggggtttgagcactgcaggccgagtaagcaagccacacccctgtcacaagtcccacagaggggtcaaggcagccctcctgtctcactttcttttttttcttttttaagatggattcttactctgtcgccaggctggagtgcagtggcaccatcttggctcactgcagtctccacctcctgggttcaagcaattcccctgcctcagcctcccgagtagccgggactacaggtgcccgccaccacgcccagctaattttttgtattttagtagagacggggtttcaccatgttggccaggatggtctcgatctcctgacctcgtgattcctcaccttggcctcccaaagtgctggaattacaggcatgagccactgggcctggcctcctttcttactttcacagattggctgcctaattgtgatcagtgtaaaatttagtcttgtcacaactagggcttagactgccaaagctatgcctgtgagacagaatattgggctgagtgggtcacgctgctcagaggagagggaatacaacccaccttgagaaagaggctagtgagcctggccagctgatgctggagattcacgttggatttccaagaacatgcaaggactttttctcatgagcacctgaagctgagaaccacgagtccacacgtgcccctcctgagggagttgcaggatccagcaggatctgtgcacacttcaggctgcgtgttgtggaatccaggctctcagcaagttctcctagctctgccttcaaaatactcgcctgtctacccatgactcccacctccaccactgccaccctgctccaaccaaatactgttgctctcctggaccattgaaaaccctcctgactgttttctctgcttctattcctgtccctccggtgatctcattaaaatgtaagatagggccaggcacggtggctcatgcctgtaatcccagcactttgggaggccgaggcgggcagatcatgagatcaggagatccagaccatcctggctaacacggtgaaatcccgtctgcactaaaaatacaaaaaattagccggatgtggaggcgggtgcctgtagtcccagctactcaggaggctgaggcaggagaatggcgtgaacctgggaggcagagcttgcagtgagccgagatcacgccactgtactccagcctgggcggcagagcgaggccccatctccaaaaaaaaaaaaaaaagtaagatagaccatctttcccctgctgtttaaaaactgctccatctcactaagagtaaaactcaaagtccttaccattgtcaacaacactcaccaaggtctggctcctgcccacgctctgaccttaccttgcagtggcctcccctctctcactcagctgcagcctcctcactattcttagaaggtggcaagcttgtcccatccagcaccctttgcacatacatatattaataatatatattatttctataatagagctaccagttagagaccttagaataagtcttttttaaaatgaaaaaacaaataaagcaaagaagtgaaaatataagaaaacagcatatcctgggggagggaaataagcccatgtggaaaagaagcacttctggaagtaaaaaataaagtgttgacattaaaaatccaatgactaggttaaaacagtgaaggattgaatgccaagaaggtagtgtttttcacactgcatcttagagctagaaggagtcttggtgatgtcatgcccttgttcgacagacaaggaagatggggacccacagagataggtgatctgtcaaaatcactagcccgattggctaggccaagagttaaggccaggtgtccatgttctgaaaatgttttaatgtgggaaagagagtaagcttgttttatatgggtagagaattggactagaacctgtgggtggctagaagataaatctttggcttgctggaaggaaaaggtttccagtagttggcactgacagcactgggctgccttgtgaggcagggagctcctggcttccaaccctaaaactgtccaaccctaaaactttatgattttttattttttattttttttttgagatggagttttactcttgtcgcccaggctggagtgcaatggcatgatcttggctcactgcaacctccgcctcccgggttcaggcgattctcctccctcagcctcctaagtagctgggattacaggcatgcaccaccatgcctggctaattttgtatttttagtagagacggggtttcaccattttggtcaggctggtcttgaactcctgacatcaggtgatctgcccgccttggcaccccaaagtgctgggattacaggcgtgagccaccatgcctgaccaaaactttatgattttaatctttttccttatactggttaaggaagagagagagaagaaccactaaaaatatttcctttttcagtgattggacttctgtccttgctcaagactgattgattgattcatagcttggtcaatttattcattgatgtactgctcatttttttgaccatttgatgcatgccagccaccagggatataaagatgaataagttctgattccatctttgagaagtttatgaggtcacataaccagtcactgggaaactgggacttgaattcaagtgtccctctgcctgcccagtgctgtttccattgggtggatattttgtgggtgtgtgtgaatgacttgtctggctttggttggaaattgtagggataagtcctttcagcaggggaagtggtacatctcacatatgaaggaattaaaccactgctttgtcttcctaccggggggacactgtagcatccaatgttggagagaagagaaggcagaggacagggtgtgctaagtgggaaacaatctgagacgaagaggtgggtgaagtcaagcatcctttcccactgttttagtctatgattgctgctgtaacaggtaaccatgaatttagtggtttaaaacaacagaggtttcttctcttgcagttctggaagtcagaagtctgaaatgactcttttggggctaaaatcaagatgttggcaaggctggttccttgtggaagttccaggggacactccattccttgcttcttccagcttctggtggctgccggcattcctcgtggctgcattactgtagtctctgcttctgtgatcacactgtcttctgttctgcccttacatcttcctcttaggacacttgtgattacatttaatcacatttaatcacaaatcaaatagggcccacttgaataatccaggataatctccccatctcaaaatccttaatttaattctacctgcaaagtcccttttaccttataaggtaacattcacgggttttaggaattaggacctggatatctttgcaggccattactcagctgaccacacccaagatcacaggccttactgcctccaggctgaggggagttcatctaagaacaacctaaagaaaggggaaacacacaagggaacactttgatgttctaacgtctttatcttttttaaaattttttttaaaagacaggatctcactctattgcccagattggagtacagtggtgagatcacagctcacttcagccttgaattcctgtcttccagcaatcctcttacctcagcctcccaagttgctgggattataggtgtgagccactgcacctggcttctaacatcttattttgtctccgtttttgggctctccttgatttgcaaaaagtaattaatgaggcaatagaaaagactatttataaagaaatggtggtgaggggataatggataatagtacagtgaaccctcatttactcatcgccagtttaagaactagaacactacctttattgtatgaatataccataatgtacttatcaagcaaactgttgatgaatgtttaggttgttctagatttttcttttgcactctctcagaaagagcgctgcagtgagcattcttgtgtgtttcctggtatacctttgcacaggttttgttagggttagtctggctgaggcagaggacagttgcatcttctacttgataacataaattaagtttccatagaaaagggggcctatcctggggctttttatcctgtgtcattgatcactttgactgaccctgcaccaacaccacactgttgtaattacgtggcgtgatgaaaattcttgatgtccggcttggcaagtgctccaccatttgttcttcataaactgttctccaaacccgttttctttcagcagtgggtgcgattccatttgcacagtgtctttaccatcacttgatactctcacacttagaatttttgccattctgatgggtaccaagtgtaatctctttatggatttaatttgcattttctgaacactcatgagactgagcatcttttcatatgtttattggccattcatgttctctcttctgtgaagcgcctgctcaagtcttgccagtttttctcttgtccttatcttattgatttgtaggagttctttaactcttctggatgctaaacttctgtcatttatgtgttacaaatgtcttctcccagtctgtgatttattttatcattttttatagtctacattgataatcagaagttcttaatattaatgcaatagacagcattttttttttcgtttatagtttttgctttttgtgtcctaggaaaataaaattgtgaaattattcttccatattgctcctagcagttttctagtttttctgttcacatttaatttcttactctaccttgagttgatttttatatatgatgtgaagcagcagtctaattttttttctttttttcttttttcttcacatgaaaagccagttttcctggctctatttattcaaaagtttatgctttctcttcagacctgcagtgccctgccctgtcataaagtgagtttctataatgtgcaggcctgtttctgggcccttcattctgtaccattgaatagttcgtctgcctgccacagtgccacgctgtgttagtaccagaactttatgaaaagtcttgatgtctggcgtggcaagttccccaccttgttctccttaaagagtgccttagtgcagtggtccccagcctttttggcaccaaggactagtttcatagaagacagtttttccatggatgggggttggggggcagttttaggatgaaactgttccacctcagatcatcaggcattcgttaaattctcataaggagctgtgcaacctaagtctctcacatgcgcaattcacaataggattcgtgctcccatgagaatctaatgccgctgctgatctgacaggaggcggagttcaggtggtaatgctgctgctcacctcctgctgtgcagccaggttcctaacagaccacagaccagtctccgtccttgtctgcagcccaggggttgggggccctgccttagtgctttcttctcccataatacatgtttagaattagcttagagttatgtgttacagcacatacacaaacacacaaatctgttgtcatttttattggactagcatttaatgtacgaaacaatagaatattgatgttctttatttatttttaatttttggagacagagtctggctctgttgccaaggctggagtgcagtggcacaatcatggcacactgcagtcttgacctcctgggtgcaagaggttctcctgccctggctcagcctcccaagtagctgggaccacaggtgtacgccactgtgcttggctaatttttgaattttgtgtagagacattgtctcactgtgttctcactattttgcccatgctagtcttgaactcctgaccttaagcaattctcccacctctgcctggcctcccaggtgtgaggccttttatttttttagagacaacatctcactctgttgcccaggctgaagtgcagtggggaagtgtactgcagcctcagactcctgagcttaagggatccttctggtctcagcctctcgagtagttaggactataggtgtgcaccaccacgcccagataattaaaaaaaaaattgggggccaggtgcagtgactaatgcctgtaatcctagcacttcgggaggctgaggcaggtggattccttgagcccagaagtttgagaccagcctggacaacatgctgaaaacctgtctctaccaaaataaatacaaaaattagccaggcatggtggcacacacctgtggtcccagttacttgggaggctgagccagggcaggagaatctcttgcacccaggaggtcaagagtagctgtggtcccagctactcaggaggctgaggttgaaagatgcttaaactcaggaagtcaaggctgcagtgagctgtgatggtgccactgcattccagcctgggtgacagagcaagactctgtcaaaaaaacaatcttttatttttagagataggttctatctcttttgcccaggctggtcttgaactcctggcctcaagcaatccccccacctcggcctcccaaagtgctggggttaccaacatgagccaccatgcctggctgatattgatgttcttaatatgtttgttgcactccatgtatatggtatctacctttatttatttgggtcttctttaatgactttcaataaaattttataattttgctataaatgtcatacacatcatttgttagatttattcccaggtatttgatatttgttgatgccagtgtatttagtatcttaataaaatttcatcttccaactgttggaagaatacaaccttgcttacctgtagattctttttggttttccagataaatagtcatgtcatttgagaacagtgtggcgttgtgcctttctggtcattattcttttttatttccccattttaccctggttaggattcccagtgcatgatgactaaaattggtgaggcagacactcttgtcttgttcctgacttaaaaagggatgcttcaacattttcccataaagtatcatgcttgctgtagggttttcagaaatatattttgtcactctcaagtgatagtttgctaagagttttcataatgaatgatattatattttatctaacactttcattgagacaatgtgatttctttttggtctttagtctaagtggtaaattgcattaattaattttaccattaaaccaaacttgccttcctggataaacccaatttggtcatgaagttgttttttcttttttctagttaaaatgatcctggaggcgatttgctaatatttaggattttttttaagctatgtttgtgagtggtattggctatgttatttttgtatggttttggtatcaagattgtgctagcctcataaactaagctgggggtgtctcatctttttctgtactctgagatagtgtgtgtaatattggatgtctttcttaaatggttagtagaatttgccagtaaactgctcagagccaggggctttttcaacaggaagattttaaactactgattcaatgtatttaatagttataggtttatttgatcttttcagatcaatattattttaggacttaattcatttctgtaatttttcaaatttatttagttaacaatattgcttctgcaccctattccttctcccctcttcttctagcactctcattagacatgtgttagatgttcctactctgtctttcaagtctcttcattttggccgggtgcggtgtctcacacctgtaatcccagcacttctttgggaggccaaggtgggcagatcacctgaggtcaggagttcaagaccagcctggtcaacatggcaaaaccccatctctacaaaatagaaaaattagccagacttggtggcgggcacctgtaatcccagctactcaggaggctgaggcaggagaatcgcttgaacccaggaggcggaggttgccgtgagccgagatcgtgccattgcactccagcctgggcaacaagagtgaaactttctcaaaaagtctcttcatttcttatttctgatttatttttctgtcactgctgcattatgaataattgtgtgcacatctgtctcctcagccatgtctaatcagctgctaaacatatccgttgatttacaattttttaattattagattctagaaattctatttagttctgtttcaaaactggccatattttatgatgtctgttccttctacatattttaaattcctttttattcctttaaacatattaaacatatttatgttatgttcggagtctgataattctagcatctaaactatttttcaggggcaatttagatctctttttttctggtggctcccaatcaaggtgcgttatgtgtcttgtaattttttcttttctttcactgtgagcttgtattccttggaatttcatctgtaggagttctttaggcctgggtcaaaggtgaattcctccagggaagatttgcatttgcttcggttaggtgtctagggacactaccaatattggactactgaaaagtaatttcttgagattttaaaattttgaccacgttggtagtgtaaatttgggctgcaaacttatgtgaggatgaggttagtggttacaagttttcaggggaaatacggtttcctcttcacctgctgctatgactagagaatgggtgtttttactttaacctttagtgattgcagcaggcttctctctcttcacccttttactgatgttgtagtgctttggggtctgaattagtttcctagtgctgctggcacacagtgccacaaactgagtggcttaaactgacaaaaatttattctctcacagttctgcagactagaagtctgaaatcagggtgtactatgctttctctgaaagctgtagagaagaatctgttccctgcctttctcttatcttctggaggttgtcagcaagcctcgcccttctttggcttgtaaatgcgtcactttaatctctgcctccattgtcacatgctgttctcctgtgtctgtcttttttcctcttttataaggacactagtcatattggattaggggccaccctaacctaatgacctcaccttagcttggttatatctgcaaagacccttttctttttcttttcttctttttttttcgttcttttcttctttggcagagtctcactctgtcgcccaggctggagtgcagtggcagaaccttggctcactgcaaccattgcctcctaggttcaagtgattctcatgcctcagcctcccaagtagctgaaaccagaggtgcacaccaccatgcccagctaatttttgtatttttagtagagacggggttttgccatgttggccaggctggtctcgaattcctggcctcaagtgctgggggtacaggcgtgagtgagccactctgccccgccaagaccctatttttaagtaagatcacattcacagttattggggtttaggacttcaacatatctttttgagcaacaatttaatgcataccatggtccaagctttatagaaggatgccctgggtcagttttactcaaaatgtggtctggggaccatcccattacctcacctaggagtttaatagaactgtaaattctcagcctcgccccctccagacctactgaatgagaatacctgaggttagggcccaggaatctgtgtgttaatacactctccaggctatcttatgcaggctgaagtttaagaagcattgccctcaactatgtctcctgtgcgtgacactctgtcaagccctgtaatgtgaaattcagtgcttcagttagcaagcgcccttaatttacctttctggggctccgcttttactttgcttttggcctctaaagcattttacactgatatcgaatatcaatgtttacaaatattatttatattgattacacttttgattttgtttggaaacctgtataaaagttgaaagaacagtacgaaaaatacttccattattcttaccttggcacatccgctccatctttttttatataaatacaaacatttccctcttgtctaaccatctgaaaggaggctgcagacatcatgctacctcaccccaaatactaaagtatggcgctcaaggacaagattactctcctataccagtggttctcaaacttgttggtctcggccgggtgcagtggctcacgcctgtaatcccagcactttggaacgccaaggcaagtggatcacctgaggtcaggagatcgagaccagcctggctaacatggtgaaaccccgtctctactaaaaatacaaaaattagccgggattggtggcatggacctgtagtcccagctactcgggaggctgaggcagagaattgcttgaacccgggaggcggaggttgcagtgggccgagatcataccactgcactccagcctgggtgacagagcaagactctatctcaaaaaaaaaaaaaaaagaaaagaaaagaaaagaaaactactttttccagaaaaaaagcaaaataatgtcaagaagagagtactgtacatttttgtaagtcttttttgtatcaaggttaatttcaatgtggaatctgaaaccttattagtggtggttggtctgtcttacagtttgagtggatcttttctgtatgatttttaacattatgcattggtcatttggaaacttggttcaccaaatagatgcagatcttcaaatgttgacacattttattgtataatatccaaaatccatatgcattaatatcactgttgatttcatcagaaacgccttcaagtattgggatactgttaagttaatggtaggataaaaatgtccaaaattctaatttttgcttaaaatatcaaatctcatcattggtaacaaatactatttgttttttctgatgagatcaatcatttttctagaaaaggattacaagatacccaggtctgaataaccggagttcatcagtcattcaagtaactggtgttccatgaaaaaaagcggataattcagcacacaactcagtgacacaagtgcttttcctctagacaatcattatactttagtatgcagcagaaacactgtatgagtgctacttatttcatcacagaatgataagaacatccatactcaagggtctggatttaatgaaagtgatgatttttactatatcatctatgacattcttaaatggaacaggattttgttttccctattgtattgtggtgaagaacacagtggtgacaggtggagtttggtgctactgccatgattcatgcaaagtactagcggcagttttacctttcattggttttgcaccatcagtgcaaattcaacacagcgaaaaggcaaatgtcttggtaatattgttgaaattgttttgacctcatggaccctctgaaggggttttagggatcccctgaaaggttcttgagatcccctaggagtctgtagatgatacagagaatcactcactgttctgtacagtaaaaaaccattaccaccctaagaaattcaactctaattccacacctttatccagcatgaggtccatactcagattaacccaaatttgtcaaaaaaaatcctttattggtgtttttttttcctgtttctatttggatgcaattagagttcacacactgaatttggctgttatgtcttttgaccaacctagaacagttgccccgatttattgaagagtccgggtcggctgtgtggagagtgttctgcatgtgtcggactcatcctaatgattagacccaggtctgacaattgtggcaacaccaccacattgatgaggaggtgcaccctcgaccgcctcctgtcaggaggtcagagtgtcagactgtctcacaattggtgatggcaaactcaaccacttggtaaaagatttacaatttctttgaatccagaattttttactgttttcagtgggacagtaagtcagggtatcttgtctgatactgcccgaaaccatggtctccttttgattattattattatttttttgagatggagtttcactcttgtcccccaggctggagtgcgatggcacgatctcggcccactgcaacctctgcctcctgggttcaagtgattctcctgcttcagcctcctgagtaactggaattacaggcatgcaccaccacgcccagctagtttttatatttttagtagagatagggtttcaccatgttggccaggctggtctcgaactcctgacctcaggtgatctgcccacctcggcctcccaaagtgctgggattacaggcatgagccaccacgcctggcccttttgatttttttttttttttttttttgagacagagtttcgttcttgttgcctgggctggagtgcaatggcacgatctcggctcactgcaacctctgcctgccaggttcaagtgattctcctacctcagcctcccaaatagctgatattacaggcacccaccaccacacccggctaatttttttttgttttgtatttttagtagagatgaggtttcatcatgttggctaggctggtcttgaacttctgacctcaggtgatccgtctgcctcagcctcccaaagtgctaggattacaggcgtgaaccaccgcacctggcccctttagattattttttaggtttgcaggtatatcagttaaaattcttttggttttagaaaaagtaatacaactgaggctggctcacacatcttaaaagtctagaatggtgctgatttcaagtgaggcttgatctggcagctcaagattgtcaccagagcatcaggttttctggtgtctcgtctgtactctttggttggtgcctgtttcagattaagcctggctcccctggctgctggcggcttctaggagccttgaagccctcttgtgtgtccagcagaaagaaggcatctctcccagagagagagcatctcctatgggagacaaggaagcttttcctctgaagtccctagcaagcctttagctctcctgattttggtcacatacttgtcattgagccactccctatggcatgggcatgggatgtgtttgactgaaaccagccaggacccaccctggatctgggaataagatcagttgtccaagcacatggcactgggatggtgacccagagagcatctgggtcctcttaccaatactaaagccaactggacctgtgggctatccaaaaccaccaacatccaccaaagagttttggtatccatgagggtataaaacactttactgagtaccccctgtgcagcagctgttgtgccatgccgttctttattcactcagcaggtgcactctatcatctggtcttgagtgagctggcactgtgagccagatgtgggtcaccactgagggaaacaactggagttttgcctcacagcatttctcatgtaaggctctaataatttaattaatgcagcagtcgtacaggtggacattacttgtctcttccccagatgataaaattgtaagctggagctaggcaggctgtgcaggttacccagcaagccaggggctggagccagacaaacgagagcaccatagtgccagcaacactatctggccccggactggatgtgacttgggggtgtcactcagcccttgctgagctgagtgaccttggctacgggactgtgcttcccagggtccttggagcagggaggggctcaccctcctggcaggcagcttccctgattgttcataccatcccatcttctacgtctctaagagtcccggctactctgagctagatacaccctcttagaccctccagggtctcaagggccctgcagggtctttgatgtttatggtgaagagctcatgaggacaggagaccaaggaggaaagaggccagagccttaagaactgcctccaggtcgggcacagtggctcatgcctataatcctagcacttcgggagacggaggtgagtggatagcttgagttcaggagtttgagaccaggctgggcaacacagtgagacctcatctctagaaaaaatagaaaaattagctgggtatggtggcgcatgcctgtagtcccagctactcagcaggctgaggtgggaagattgattgagcatctgcttgttgggctcaatcaatcctcccacctcagcctcctgagccaagatcgcgccactgcactccggcctgggcaacagagcaagatcctgtttcaaaaaaaaaagaaaaaactgcctccccaaaagcacactggggaagaagaggaggtgaggagtgcagaattggctggtccgttcctgtggcttctacctgcccagacctaagagagtacctttaaggagtggctggagaggctcttttccatcttcttttgtaacagtctagccctgtcgctaggcctcctgtcctagctggctcaccccagccagcctgctcaccccacctgggcctgccttagctcaagagaggctgggatccaaactctgaggtcagtctgagccagcccagccctgcagtgccttccagggtgagactgaggctcagcatgttcctggaggcaactcatccagtttaatgagactccaggtggggaggtggtttccctatagggcatgggcaaatttctcagctgacagccaggcatccaagctgctgccactgggctggcagcaggatgagatcagctgtggttgtggccttcctggcaggaggtaaggcactgtggggcttggtgaagtcactcaggtgggagcactgctcccgggagaatttgcagaagcttcctgggtagatagatcattccagtcactgtgggtcagccttttcttcccattagtctgctacttggcagtttgcaaatggcttcacatctgtggttggatacaaagtcacaaacgtggtggctcctggctgaaatcagcctgcatgttgcttgtttagcttgtggtgttttaaatttgaatctacttaaatagagagatgtggcaccaaaattcaaattttgggcttctcttgaagagtcagaagatctggcactgcaggatgattccatcagggcagcatcagccaagctgaggggtggctgctcccagggcctgtgctccctgatctgcctagccccacctggcccagttactgcaggctgtggtggtgaccatgtctcatctcacacctggtcttttccatcactggcctggcccttgattctgtattttcaaagcaaactggggaggtgggcattagtatctctgttttgccagagaggaaaccgaggctcaaactggtttcaatatgtcatgtaggaaagtagtcatggcccgattcaatcatggctctgccatttaacagctctgtgacactgggtgagtcacttgccctgtctgggtcccagcctttccattcataaaacaaagaggttgagggctagctaggtagcaaacttctcagtataagaaacagatggaatccagagaagctgggagaggagaaggaaacaaaggagaggtgatggcccaacaacttagcagaaagacattttaaaaggatctctagccttagtaacatagcaagaccttgtctctacacaccaaaaaaaaaaaaaagaaaagaaaagaaaaaccagccaggcatggtggtacatgcctgtagtcccagctactcagggtgtagggagcctgaggcgggaggatcacttgagcccaggtggttgaggctgcagtgagctgtgattgtgccactgcactccagcctgggtgacggagcaagactctgtctcagaataaaagaaaataaaataatttctgatattcttttaatccatttgcttttctgtgatataaacttgctctgtgtcccagaattttaagcaaaattggctgttcacactaaaaaagaaaaaaaaagcagaagaagaaggatggtagctaaatgctctctggggttcccgtctgaactgatgtctgtcactctgagtagtcattggcagtgtgctgctaggtgccagaggaacacaggatctgtgccttgattcccagacctaaaggcaaaacttagatccatttaccataataaaaataagtatgtttgttgacacataatttacaagtatgctttatgtcagatgttgcattgaaagtctgcatacattatttctcttaaccctgactgtagccccatggggtaggtactattatttccattttacagataagcaatcagaggtttagaaagggtaaggaatttgcccagctcttttttctttttttggagacagggtctcactttgtcatccaggctggagtgcagtggcatgatcagcactcactgcagcctcaaactcctgttgttcagttcttaaacattacatattagagccgtgaagcaaattcaaatctgtctgattttacagctcttgtgttgtctttgcctaagtgttgctgcagccccatctccatgaatggatcatttatagtgcagggcaatgagattagggtccagtgcttctgcaagcaggaagaatcgttgaaacgcagaagtgctgtgggctggactggctggtccagggagggtgcatggaaggggagtaaatggtcttccaaacacagtttggattcccttctgcagccagtatgaagttatgtgtgatggtgagattgtgccacttgaaggaccagactggcctgaaaattagtgtcatcttaggagttcaggtggtaaaggtagatgttgaggtcaaaatacagaactttgctttcaggcaggggtgagctggtgagggtttgtcaggaggagtgatgtgaaagcagtgtgtctgtgtcaagttggaagcaacaagggctgaacccgagtcttggcggtgagaatgaaaagagagggctgcattggcaaatcagtagaatgggaacaatcggcaggacttgaaccacacatgtgcaaatcagaaggaattttagaagtcatctagttccgtcttgtcccagcacagggactcctccattggtgacctctgtgatagctgtgcatcaagtcactgccagtgcaggatggtagaacgggatcttacatggcaggtagcttctaaggccagcacataggggtgacagatactcagtgtctacattgggttgaataatgtctctccaaaattcatgtccacctggaaccttagaatgtgaccttatttggaaatagagtctttgcaaatgtaatcaagttgggatgagttcatactggattagggttagtcccaatccagtgattggtatccttataaaaagaaaatctggacacagattgagacatgcagaatactgtgtgacaattgagccagattggagtgatgcccgtccaggccgaggaactccagggattgacagcagctgtgagaacctaggaaaaggcaaggaaaatcctcccctagatcctccagagggaacgtggccctcatgatactttgattttagacttctagactgcagaatgatgagagaaacaatttctgttgttttaagctaggaaatttatggtactttgttactgcagccctaggaaactaatgcagtgtccactacctttaaaaacccatcggcccctgctggcccccctgttgcaggaggaaataagggcagcctggcaccatgcgggcagaacctggcaggactggtgcaggctcccggtatttttctctttcctttctagtgctcacaattattttaataattccatctagaagtttgcattggtgttcagtcaccccataatttagtcctaggggaacttcagttcctatgactattcctgatttccgtgaattggcttgaatcatcactaccctctccagagtgccatctctcctccctcccttagctgtatctatctactttttcttccctagacccttctagactgaagtagattctttgttctgccacctcaaagcacacactgctagcaccaattattggacaatgacctacatagctgtccagaggtatcatgtgtgtttttgtatttcttaactcatagatttgtttcttttaacttcaccagtgtttatgtcttgcctcttaagtttatatcatagtcctttgaaggcacacagcctgtcttttgcttccttttatcctctatacaccgtacattgttattactacacatacacacacacacatacacagagagagagagagagagagaaaggggaggagagagaagtaatgatggaggataattttcctcatctaggaaagattagaaaggttgaaggttgacttgaaggagaatcttgatctttagggtggaaagcatgctctggcccctagaaggtgatgatatgtctatatacagttatgcattgcttaataataggggtatgttctgagaactgtgtcactagatgattttttcattgtgtgaacatcatagagtgtacttacacaaacctaggtggtaccgcctgctacccatctaggctacatggtatggcctattgctcctaggctgcaaacctgcacagcatgctactatactgaatactgtaggcagttgtaacacagtggtatttgtgtatctaaacatagaagacatacagtaaaaatgcagtattataattatggggccactgttgtatgtgccgtccattgttgaaacatcattatgctctgagcaagtccagcctcatttgtctgtaaaaggacaacagagccattgagcatcatgcatgtgcccagttctgtgatggaccatggggaggcgatgctgaataagacagacatgacccttatccagtgcttagttttgtggggaaaacgggaagtaactacttcttgacctgattccctgtggcttttcattatggtggcaaggtacagacatgcttggtgatcatggtaggcccccggcagccttgtttgtgctgcacgacctgccctctccacttggctatggctggttggatcacacatggacacctgacccaagctgagccaattatattttccccctcctggaaacacagacgttagattcagaggcagccaattgcccccccaaattcgtattttgaagttctgattcccaatgtgatggtatttggagatgcggcctttgggagatagttaagtttagatgggatcatgagggtagggcttttatgatgggattagtatccttagaggaagagacactagagagctttcctgcctctcttttcccaccatgtgaggacacagccaaaagctggctgtctgcaagctaggaagagagccctcaccagaacctgaccatgctggcacccgatcacagacctccagcttccagtgctgtgggaaaatggatttctgttgtttaagccatcccgtctgtagtgttttttgttatggcagcctgagctgacgaattcaagaggcaggagctgtaaagagtaagagtcaagaggtgtgaaggccgtgtttggccgtgtggattgaagagcagtttacatgaagagcacgtgtgttgtgatttctttcaaagttggtcttcaggtctctcctgagagtggctgtaagccaagatagccttgaccagggggaagttaggtttgggtctgccagtcaggtgaaatacagtgaggaggtgaaaccaaaatgtgtgaaagagaagacatttattacttacaggtccagagaggttaggggtgctgacgggaggccgaggggaagtttggaagtggcagggagctcacccagggagtgacaggagcgggctggagagagagaaatgtaattcccccacagcgaggggtatttttaactaggccaaaggtgacagagtgctactgtgtttcagataactcatgtcaggcctaaaggtggatgccaaggcagcacctatattaaacaaattcatgacagtgtgggaggtgggtcagcagaggaggaggagtgatggagacactggagaatgccgaggtggcagacacatggcctggccttccaggactctccagtccctagttctagactgttacaaggcccagctgccttggggtttgtatgctaaaccctccctgcacccgtgtcctccccacaaattctctttactgcttatgccagtttgagtccatttctgttacttataaccaaaagaacctctaccaagacacttcccactttacaagtgaggaacagaagagcagagaggctgagtgactgcccagggtccactggtgagtgacagcgctcaagcctcactccagctcttcagaccagttccctgctgtacatgcccttccagttgtcacggcaagctccttagggaagcagacccagggcggttctgaaaccacaaggagaaatcctagttgttactcctctaccactccctctgttgcccaggctggagtgcagtggtgcaacctcagctcactgcaaccttcgcctgccatgctcaagcgatcgtcccacctcagcctcctgaatagctgagactgctgggactacaggcgtgcactaccacgcccagctaatttttttttgtatttttagtagaaatggagtttcaccatgttgcctagtctgggcatcaaccttttaaaacatggtctgtgttctgtcatattaaaagtgccattcacacatcaaatatgcttgcccccttttttctgtaatgctgtcaaatggaatagctcagcctttaccacttgcattattgcctttggatcttgcatctaagagattcttagcagtgtgcactggctgatggccaggatcttcccatgcctccgtgagttctttgcatttatcttccttttgttctagtgatctgacccatatttatatctcaaggacaggtgattttctctgagctgtatgatagggaatgcctgacaacccctgtttagtttctatatttattttaagacatgttttttaaatgagccaattaattggaaaatatttatatggaaaggaaatgttatcactctttccatcatcctaccacaactgccaataacattgtagagaatctttcttctagttttctatttgtcaacttaatttgtaaaaatatattattgtaattatacatattaagaattttgtatttcacttctcttggtaacgtaatagaaagtcttctgtttcaaacattttgtaaatagcatttttttcttttcttgtctttttttttttgagacggagtcttgctctgtagcccagacctggagtgcagtggcgccatcacggctcatggcagcctcaacctcctgcaaagctgggactacagacatgtgccaccacgcccagctgatttttacattttttgtagagacagggtctcactcttgcccaggcgggtctcaaacgtttgggctcaagtgatcctcctgtcttggcctcccaaagtattgggattagaggcatgagccactgcacccagccctaaatatcattcttaatggctgtatccattctagtaagttgaacacaatttacttaagtgtatcataaatccttttgggcacaaatggacaataaataaataaaggaaatgtaagagccatgcctctatttgttagacatttaggttgtttctgattttgtgtgtgtgactataggtaatggtatggtctactcatttgttttttggggtcttttccttatgctagattccataaagtagaacatggataaataggtgtgacttttttttttttttttgacacagtattgctgtgttgcccaggctggagtacaatggcgtgatctcggctcactgcaacctccacctcccaggttcaagcgattctcctgcctcagcacccgagtagctgggactacaggcggtcaccaccatgcccggctaatttttatatttttagtaaagatggggtttcaccatgttgaccaggctggtctcgaactcctgatctcaggtgatccgcccacctcagcctcccaaagtgctgggattccaggcatgagccactgtgcctggccaggtgtggcttttcaaaagggtttttttttttttcttttggctcccaacaggaaactatcaaaggacttttggtacatgccatcatgttgcttttcacacagagtactgatttattccccctaccatggggaccagcagtgtgaggcctgtaagaatctctgccctggcctctgaataagtaatgtgtaagagtaaatacatgtgttctattagggtctttgagatctgttaggagaactactaccaaacaccaatttgtagatcagataacgctcatcagaggacagggaaatgcattttgttctttcatttgataaggttacagtaactgcttgtccccagcctctggaaaaatgttgcttattgcagtactgtagatagttttacataaaatccttccattgtctttgtgtttttttctgatggatgagtaaagactaggtaacagtttgagcaaactgggagtattttattattatcatactttttcaagaaaagggtgggatggagagctagattatcttgactcaaatatttttgtgtattctgtgttttgggaagaggagcctttgtgtttttaggctagggtggtggagaaggtctcacagaagagagacctgatttgggatttcagaagggttaagagagaatgaggacacagcatgaacatactgaagactgggttagaatttatgtggtatgttggttttggctggatcagcaggtatgggctggattgcaagatgttggaaagtcaagccccggaatctggaaaaaatttaatagtccatatggtgtcattcaaaggtgatggggagggagggaatgaaatggtacagccacttaaaaaaaagtttggcagttttaaaattaggttaaatatatacttatcctctttcatagcaaaatgaaaacatatgtccacataagactttactccaatattcttagcagcctttttcgtaatagccaaaggttacgagcaggcgagtggcccgaggagaactgtacctcaggcagaggaatctggcagtgaggcgctaggtgagccaaaatgggaggaaagctggttagaagtttctcgagtcctccgggcatgcaatgaggagggctggagttgtgagagtaataaggaagggctgaggagaaaagttcctacagaggaaaagtccaaagcctggagcctgctggctgcaggtgccaagggagggaaggaagaggcaaatctgagtggcagatggtggtacagagggcaggggtcttcagtgggggaccaggggcacttggtagaagggcagatgttcaggccccacctcagacctgctgaatcagacattttgggggtgggcctggcaatctgtgttttaacaagcccacctggtgattttcatgcctctcaagtttgagagctcctggaatagggaaattggcttaaggcaaggatatgtgatccaagaggaaatctcccacaggctgttagagacaggagagcagctgggctgatgtggatgctgagcttgctcagctggtgcagaccagagtgcaggggcttgccctgagggaggaaacgggtacacagaaaggcagagggctggggccaaacttggggatgtctcagggagattcctttggatgcaagtaacagaagcctgcttcacaccagcttgagcaagcgaggacatttatgggaaggatactggcccagctcctggactgttaagactagagggaccatctgggcctcatgagggcgcagaacccacacagcttctgtgtctgtctgtctctctctcctttcccccttttaattcatttaaccaatatctgtatatctgttgaacatctaacaaggtacctcgtctaggtaccaatggtaagcttaaaaaaaaaaaatgaagacttgactttgcccatagagcctgtctgcctgtctgtcttagcatgaagtgtctctgcttctgtctgtttcaatcttctctctggagacatccgtctctcttctggtgagcatttggccagatgtggccaccccatagctgcttaagtttacagtctttgttttaagtaacctgcagacatctcagccatgattctatattcctggggaaaaaaatctgagagcattttgggcccaactttggtcacatcacctctagctggagacagagtcctgtggtgggtgcccaggggtgggggtgaaggtgggtggtctttataacagagggattgggcagcatagctatgccaaacaggttgtgtttcaggggcattgttttcatccttgatgtaagctggagcagggagatggtctttgtttgcttaacttcttaacaagcactccagcaatgatagcggctttgggaggggaatgcgggtttgtgtctgctaaatgaaaattagaagggaggagcttgtggatgcaaaggattgaagcattgcttttttcttttagggggtaggtagataagctttaaagtccccctcccaccctgagagtctgcgattggaaataaaacaacagagttcgggcagctgaacctgaaggaagggaattgtggtggcatccgtagtctttccccttatccagagtagactcatcttttatctagttactgctgtgacaaatttggatacattcatctttcttcactgtgaaatcgagggcttggttgctaatggttttacagaaattgttcctttgttttgctggaatattgatgagtcctgggagaccataagagcacctgtgcgaatggctcttcacccaccttccttagaggggatcttcaactctctggttcccttcacagcctgggttgtaaactgcttttgtaacctctgtgctgtaccttcaccactcgtacattcattcaatcattcctatttactacatatctaccaagtgtcgcaccctgtgctagtaggtcggcttcatattttcagtcaccagcctagccaccttcctcttcagtttttcctcctcttctcaccctttggatggatgctgtcagatgtgctctgggggtgattcctcccctcagcctagcttctgcctgacccagctgcactgagccatttgtagctgcaaacccaccatgctctctcatgtttctggggtttattcatgctgttctcccctcctgaaatgcctcccctaccctaccttcttccagaacctaccaaatccctgctcacctttcaagatctgctggaacatctcctgcccttagaagttgctgatttggaagtccagccttaggcctggtgtggggctcacacctgtaacactagcactttgggaggccaaggcaggaggatcactttagcccaggagtttgagaccagcctgggaaacatagcaagaccccatctctatacaatttttttttttaattagccaggcagccaggcgtggtggctcatgtctgtaatcacaaaactttgggaggctgaattgggaggatcacttgaggccaggaatttgagaccagcttggccaacatggtgaaaccctgtctctactaaaaatacaaaaaaaattagccaggctggtgatgcaggcctgtagtctgagctgcttaggagcctgaggcacgagaatcacttgaacctgggaggcggagcttgcagtgagccgagatcatgccactgcactccagcctgggcaacagagcgagactctgtccaaaaaaaaaaaaaaaaaaaaaaacaattagccgggcatcgtggtgtactcctgtagtcctagctactcaggaggctgaggtcagaggatcacgtgagcctaggaattcgaaggtacagtgagctaagaaggtgccactgcactgcagcctgggtgacagagcaagaccccatttctaaaaaataaaaatatttttttaaaaagcaattcagcttcagccttcagagcattcattatgggtgtgatgatctgctcgagtggaccgtagctacacttgaactcagtgagatgcaggactgtcccactcatctttgtatcatgacagtacaaaggatctgtcatggatgaagggtcaaatgctactgtggtcaataggatggggaagaaaaggaaaggataaagaagaaaataaaaattactcataattccattacctggagatacattttggaggggtccttaagactttttgaatacaaaaagtttatgattgaagttactgtgtatcttgcatttccacttaacattaatatattaatactttattgcccacaagagtcctaagataagattttagtgaccttttaatgttttatagccaattctttctttattgttggatgtttatatcattttcagctttggacataagaacaccatggaacatatttatgtgttaatctttgtttgcctctgatgatttcttttggatagattcccagaagtgcaattactggatcagaggatagcaacactgttaaggtttgagaaataatgccaaattgtctccccagactgtgccagtctctactctcatcctcagtttttgatggatgggtttgtgaattctttaaagagatagaagcaaaaaaccgaagcaccaatggcttcattggctgttgtttccatttggaggaaacggcagcttttcttgtgataggagccaggttgtagagaaaaacctgtcccattgcagccctagaggctgggaggttggccctcagtgacaagggcccgtgttctcagcctccctgtccttttccaggctggagtctgggacccgggagcctcctgaagagactgcacagctttctggaataggggagggaaggaagctgcttggtgacctttgggcacaagctgcaggcagcactccattagctgcacatccattaatgaggaagtcaagcttcaggaagctgggctggctttataaagcctatggggaattaaaggaaaagggagtgtggatgaagcatttgttgctgtcatggtggggggaggtcatgactgggcattcatctgcatggggcctcctggccagttaatcccagcagcaaatgtgggttttaagaggttagtcatctgcctacagggaattggacctgcctgggaaccaaacttgcagcctcttggacaggtgcatctgttgaagtgttaagtatactctcgcttatttttgctgacttcgacatttatggaattgatgcaacttagaggacactttgaaaaataaagtgagccctaatcaagttgttattttccaactgatcatatgtggtgaggatgctctctcataaatgatattttaaaattgacattacattgtcatttagtaaattttgaaaatgaatgaaagagtttaatataaacatgacgagagataggaaactagtatttctggtattgtcacgctggtctcttgaaaactcttgtttcatttaatcctcaaaataggaattgttgttagttatttttatagatgaggggactgaatcttagagaagttcagtaacttaatcaaagtcataaagctaatacgtggtagaaatgagatgagaatctatgtctgactgcaaagcccatgccctgcccggtatgcagggagttgttttgcccctgaccctggcaggaactggaaggaagaccttgcaagctggctgccattatctgctcctagggaagtgggggctgtatgcccatggaaaagcctgctgtggtttccgctggtgctgtgatcagctctgagaagcacttagagcccgctccaaggagcttcaaagagaatgcggatgaaggagttggacagctcccagcttctctggtctcacatcttcactgtgggtgcttgtatttagttggtgtgatgtgactttttacgcaaacatacacgtttggtggtcacctcattcacatctggatactgcttaattggattcttggctctgacagcttctgaattggatcctcaccttttggtgccagcgcaacctgggtttgtcagtggtacccagaggcgtgaagggctttgtacacagagatgcatgatttttcatcagaggggacttggccagccccagtggatgcaagttcaagatggagagaaggctaaggggacccaagttttagggcatccattgtcagaggttttgagggctgtatctgagtcaagtcctctttaagcttttttggttttggttacatgaaccaagatagataaaaccaactggccttagcatgagccaaaacaacaactctttattgtaaagaggcagggagttgcagctgagtcatgcggccctgggacctggaaggcagttgggaagccttccctgggccctggtctcacttatctgtttctttggccacatctgctcgactctctctgtgtgtctggtactctctctgactctctctcaccctagacttctacttttcatgtgtatatggccaagcacggccatgcacagttgcagtccccactcttgagtttatattcctttagttcaagtatccagcaggaattactcaagtttctcagtaccaatgccaattcctgtgagacagaacctgactgttgagggcctggaagcgttgtgtggtatgaaactggcttctggggcccatcctagtggatgagaggcacagttctcagcgcagaggaaggagggcaggacctgtcgatgggaaatagagagagtggaccgatttggctaaagaggcagaatttggactggaccaaggagtgaaatcccaggtaacaaattttaagtcagtaaaacaaagagctccttagggtggcccaagctggaccagcctgcgtgggatgatagcaagttcctgtatgtgcagaggttcaaacagtccagaacagcattctaaagcagatccaagcatctgctggggtggacaagatggctctcatggtcccccctggccatgtcagtctggccctgggctgctgcctctgctgcagatattttccttggattctccactcacagaaggaagattggagggtattttactggtgtacttgtattagagggccatattcagtctaccagtattttaactactgttgttgctgggtgttggattgtggatgattttgatttttgttttattttttacatattttaaaatttttctacaatcaacatagatgagttgtgcttatgttaacagtaagaagttaaaccatagtttattagtagccaataactactttattagtagccaataaatagtagccaatattaattgctactctagatggtgttgtggcttgtataagatgaacgcagtattgtccttgctcttaaggaacttgtagcctaatgaggaaggtatgatataaccacataatgcaagctggaagaaggctagttaagtgctaatagaacattaccaagtgtgtagaaggcacacatataacccttgttctaaggagctcaggaaaaggttttataaaaagaatagccctggatctaggcatagaacagtggttctcaagcaggggctgttttgctctgagaggacattcggtggtgtctggagatgtttttggttgccacacttggagtggggtcatctaatagttaaagcccagggataatgctgaggacagcccctcacaacaaagaattgtctggccccaaatgtcagtagtgccaaggcttctagtccaatgcattagaagaatgcataggattttggcagacagagttgggggcagagcactgcaggccaagagaatgatgactgagcacagtggcagaaatgcatgagtagacaggaattagcagagggcccaaggagctggtgggacacctgcagctaggtggcagaggcccttgatatcaacataagcagcttggacgtttttctttgggcagtagggaacaatggtatcttttgagctctatcaagaatagagtcagttcttaacatcccagctttgcttcattgattgctcatctgcacagccacaaagatgaaaacacacccgttttcctgtttttctccccagcctatccactctttgttttccaccatccagaggaaagctcggtcagcactctgccttgctgacccaggattcccatctgctggtgacaaagggatacagcaaaaagcgatccccttttgaccattctccttcctgctgcaatttccaggaatgtaccatggcaagggtgactgtccatgactattctgctggccccataacagctttgctctgcgcaccgttgtttgagtgtttactaacatcctcacactatctctggatgcagggtggagggtagagggcccagttcatgctcaaagcgtccacacggtagaaacagcccagcagaggccagggctggacctgggtccgactgcaggcatggggataaacaatgcttgagctgtggaggggagggcaccccagaactcgacacggtgctctcttcatgtgttcactcctgcctcaccagcaatagaacagtgttacacacccatactggtaggcactaggtgaatgttttctgaatgaaagaatgaagagacagatccagggagcgggtgtgatggcctaagattacccagcctgttgggatcagagctgaacctggaaccaggattcctgacccccagttgggagcccatccctgtgccacatctgcccttccatgcccagggacctggtgctatcatcctgggtcctggccaggcacctttagccagcaccctgttctccaaacttctcccattccttgaattccaccattccccaaaccaaccaatccatcaacccagggaaacagcctagcatgcccttccctacctgctgccagtggccacagagctgttaaactactctacactaaaatgttggagactgctagttagttactgtggttatccacttcccccaggatgtctctgacgatgcctcaactcaggcatttcttaatggaccagttggggtgggaagtggggcatgcgaccctatatggtgctgaagtttttgccaaattatactatttatagtaaggccttcttggctcaaacacatctagggaaagggaacagtgtgaacttgtcagttgttttctctttttattttgagagggacccaggctggaccttaggcatcctctgagatcccccagagtcttctgggaagaggcatttccctcacacccagaaccagtgaatgaggaggtaggttgcttttatgattccactgagacagtgacgctcctccccatggcttcagaaaacatccaccttggaaaagtaagtgttctcttcctccctccaacccccggggagaatctctcttgcaggtagtggctgttcttggtctcccagctaggtggcatccctgcatcttttaggtaccagggcttgtaccaactccaccccaggactgggtaaatgactcccatgatggctcctatgtcagcccttccagtggtgggacaccatagtccatggtcctctggtcagagcttcccttgtaggaaaagcatttttgcaagtctgtgcagcatttccattttcaagtatcataacgtatattatcccatttgacaccacattttgcagaggagataaaacaagtgaggcttctgggctcttgtccatgaacccatgtctagtaagtggtatagcaaagaccagcaccaaggtccccaagctccaagctctcctgggtggtccctccttccatggtgcagcttggagtggcttcacagccaggcagaacaggggccacaccctcgtcacaagtgctggccagctctctgggcaggggaagcctctggatgttgagtatggaaggagaccatgtgggtggttggtagcacagtgcctgcctggagtaggccctcagcaaggggctctgggtctgcatgcctgacgtgcacaacgtggcacatgttctggtgggagatgctgagggagggggtagatccacgacatggagggagcaacacggtccctcgctgttttgattgttttcagcagaacccaagttgtgttacaatttgcatgaggcttgttaaatgaactgatgtattagacaatctaattttttttcttttttgagacggagtttcactcttgttgcacaggctggagtgcagtggcgtgatctcatctcactgcaacctccacctccccagttcaagcaattctcttgcctcagcctcctgagtagctgggattacaggtgcctgccatcactcctggctaatttttgtatttttagtaaagacagggttttgccacattggccaggctggtttcaaactcctgacctcaggtgatccgcctgcctcagcctcccaaagtgctgggattacaggcatgagccactatgcccggccttagacaatccaattttaaaccagtcctcatgatgacttaaaagtatttcctcagcaaagccaaggacttgtggtaatacaaatacatgtgatcaaaatattttactaattttgtgcgatcaaagaagttggagcatccatggtttagtacctaagctttgaaatctcacattctagttctggctctgctacaaacttggtgtgtgaccttagtccaactatttaacttctctgatccacatttccagtctgtgaaacggaaattataatcatgtctacttcgtagagtttttgtatgtgcaaatggatataaactgctaaaagctgtgtacagagcgtgcattgtattgtaaccagtgctaattactgaggagtgctatactggtaactttttttccccaaagtgtgaagctttcctttttagtcttgattcctggataataggacattcttcacttggactttcccttatggtcacctatgattgtggccatttgaggctcataaatggaaagaatgtatattgttttcattctgaagcaaataaaacttcttacatttccatgctcagagctacctctttctgttattgtcttggaatttttttctccttagtgacctagttttatctattctcttcagatctgcaaaagcaaatggcacagttgttaaagaggaattctcattctgtggtagttgagagaaatatctttattttctaaacaaagcagctgtgggctgggcgcggtggctcacgcctgtaatcctagcaccttgggaggccaaggcgggcggatcacgaggtcaggagatcgagaccatcctggctaacacggtgaaaccccgtctctactaaaaacacaaaaaattagctgggcgtggtggtgggcgcctgtagtcccagctactcgggaggctgaggcaggtgaattgcttgaatccgggaggcggagcttgcagaggcggagcttgcagtgagtggagatcacaccgaagcactccagcctgggtgacagagcaagactccgtctcaaaacaaaaacaaaacacaaagcagctgtttgttatattttaactttttaactattgtgcagtattccaccatactttttagagcattaccgaggattgcccttcaaagcatcaaacataaaaaattgttatccaaaggaggacctcaccttccttacacagggtctgtattgcacatggtggccagggcccttggagctgtgcagccagcagtggctctcctaagtcatctgcagggcaggtgtgcgagaggtacatacggtgggttcccgccccagtctctctgcttccttcttccccaggttggccaactcgggagcaaggtccagaacttccagccagaagcgcactttagcagctgcgagctgcatttgttccctgattgtcctgactcactcataattaagacacgtgctgaaaattctctcagaatttaaattttgctcattgaagtaaagctgctgttttccagcttgctttttttcttttcttttctttttttttaaaataggttttgtgttctaatcagggtgccatgctggacctgagccaaacatcctttgtttcacacaatccttgttcttctgtgggcaggtgggacatagtcccaccctccccttctagtgaggtaacaaccgtgcttttgttagcagttctgagcccttctgctgccagacaaacccagtggcctggaatcatggtaatttcttatgagccacacaattatttataaccaagccatctcagatcctttctggaacaagttagaaacctatctatctatctatctatctatctatctatctatctatctatctaaaatataaatctcagaaacattttaatagtgtaacttcttaatagaacataatatacagcaatgttttttcctctacaaccagaaccagtaaaaaatatatttacttgcattacttgttaattttcactcatcttaaatgtcattacaatggattgaataaattgagatgtttgaaaattttagtaaattttacaaaatagcattgtcgcatcaaacagatataaattgaaagattatatattctgttttcttataacttttttagaagtaatcttttatggattaaatgaactaatgacctatactaagtaaattctgtttttataaaatttttaactatggatgattttgaacaaatattcatgcagatatttttttggttcctaaatgtcatgaatttattttattttaattgtgataaaagcacatgacataaaatttaccatcttaaccatttttaaatgtacagtcagtagtgtatatttattgcacattgttgtacaaccaatctccagaagcttccatcttgcaaaactgaaaattataactccacacccattatcaactccctatatccccccagcctgtggcaaccaccattctactttctatttttatgagttttacttatctagttaaggagttgagttatctagagtagtccacttataaatgtaatcactcagtatttgcctttttgtgattggcccatttaacttagcataatatactcatagttcatccatcttagcaagtgtcagcgttttcttcctttgaaaggatgaataatattcattatttattcatctgttgatggtcacttggattgcttccatcttttggctattgtgagtaatgctgccatgaacatgggtatgcaaatatctttttgagacataaccattctactctgttaacttggctgattttaacagatggggaaatcagtaactaaacgtataagaccagcctcacttggcagtgtttgttcacatggtgtcataggactataaacagaagcgatgcagcctcagtacagctgagtgagggggctggaaaaacctgaactttcctgtataatttgaattcaaatcttgattttcctgattaaattttctgtataaattcctaataatttgcacacagtgaaattcaccctttttactgtatagttttgtgagctttgacaagtgcatacagtcatgtaatcacaaccacagtgtaaatatagaacaggttcattgcctccaaaacttcctccatgcccctttgtagtcatcatcttcttctaccccactgccagcctctggcagctcatctgttttctatctccgtagttttgcccatcatcatttgtctttccttccatacttagcacacgcagctttgcctgccacctttcttgttctgatacacctggcaccccggccatgttgtgacttccctgaagataaaacctctgactttgaggtatcaagttggattagaagagcagagtttgaagccagatagagcatttgaatccagctcattcagttagcagctctgtgaccttgtgttggcctcagaatctgacacagagtagggactgaataaatgtctgttggatgaacgaacaaacaaatgaatgaatgaatgaatgaatgaatgaatttaacctcttaatgtcccaggtccctcctgtgtaagagggaatggatagtagttgcctcacctgacttctgtggggatcagtgccttgtacagtgcctggtgggcattagtaaaggtttgtcctgttcccatggccttccccagggcttttgataccctctgccagaccgacacatgcactcaaagttggctgggccctggcagaggacatcagtacctgctgtgtgagagcgaggagggcaccagctgagcagacaagtccccagaaaaccccacagatacccgctgaccacctgccagtcaatctcaaagagctcctcactctttccccccacccctttttcatggtgcacataggaaggcccagcagtccttttctcagcctaaatatataccatgtagggggctttagatgaagcccaccagaaggagaaaaccataacccttcagcacagaaccctctggctgggggtcaggtctctggctctgaggtctggggaggggagcataagctgggaaataggcaaccacaggacagtcattgtaagtgaatcttctctcttcttcaaaacagactcagcaggactcatcacaattattgtgatgacaataaccagttatttgtataattatctgcttgctgcctgcctttcctatcagatggcccagggcacacagtaggtgctcagcacatatttaatgattgaatgaaaaacattttgtggttaaaagaattggcatttgcagttactgtttctgtagaagggaggggaactgatatttgtcattcatctagagtgtctctggtaagttaaatttgtacctacagtctcctcatttaatctgcatagtggctgttgaaagtaggtgtttttggtctctgtactcaaggaaactggttcagagtagttaagaagcatgcttgccactccacagctagtcagggttggagctggattcaaactcaggtctgaagtcaaagcccagcctctttctaccacacacaataaagctgggttgcttaagaataggaatctctacaattaagacttaaaaacaaacaaaaacaacagatttaggcagacatttgtggttgagggatttgtgtggattggattgtggagtggaacagtatcaattggaaatttacagaatgtttgttcctgcttgcatcagacttttctgttttgtgctttcctaagttgggtttgggagcataaaaatccaacttaaaatgggatttttgcagcacacattacagacagctttaaataagtaatgcaactgcctcttcatgctaagaaaggcagtatggaacggggaatggccagggacgtggagacaggaggcctgggtttgcgtcttgttggataggagaagggctttggaatatccctcaactactctgaggctcagttttttttatttgtaaactgggaaagtaatcccattgtctcggaggggtacagtgcagatcagatgaggaaataagcaaatgagatgtttgtgaggtgggttacccaaggaagagttgtgtatgtgttcactctctcaaatctgcagagaggagcagggtctgaagccaactgggaaaggaaagactacagagaggctggcagaatcacatgccaaggtgaaaaagaagaacatgtctcgtttctgttttcccaagatcagctcaggtcgggagagaacctcgtttatgtgaacagtttatgtgcttgaaaccctaaaattatactgtcacctgttgtcagtaaatctataattcagggccagagtggaatttcattaggcaacgaagcaggcagcagtcttcctcccactctcctactcctcattcattcattcagagaccagctgcagactctcagccatgtactgcagagtcaggaaggcagtgtgtcatagcagtgaggagatgggcagtggagttagacatgtgtttgactttggcctcctcccctaattgtgagactcaattatttattttcactaaacctgttttctcattattatgaggaaaatgataatacctgtctcacatgaaggttaaaagtgagcactcaaaaataaatggcttataagtcacaataatacagtctttagggaaccaaaatgcatagtgggccagttctgctgttttcctattttctccctccagcctgttagaaagtcactgtgagtaagcagaagcccaggggttgggacccatggcaaccaaagcccaagtggtttgctgtgctatgggaacctgagctgtgtgctcagacggaggatctcttttcccagattaagcttctagagaaccatcgtgagtgacgatgttccctggggcagtatggtaaaggtcagagtttctcaagcacttagatcccaggcccacagcgtatctgagacagtcctttcagggctagaggatcagtgggtcttggagatggattatggttttgggaaggcttgttttgccacacatggaccttctgacatcaggaaggtactgattgtctcagagcttggaggctgatgctcaggtcaacttgatccacttttggagagccacgacacacctcacttgtgagtgtgaattcctctgaatgctttggtttttttaaaggtcaggtgtatagtggtgaaattggtaaaattcactctttttagtgtgggttttaattctgagtttgggcaaacttatacagttgtgtaaacagcactacagtcaggtatgcagcagctccatccctccccaaaattccttcacattcttggagtcaacctcccacctccccatctaaccctggcaacgacttatctggtttttctccctgtaaacttccctttttcagaagagtgtataccagcctggccaacatagtgaatccccgtctccactaaaaatacaaaaatcagctgggcgtggtggtgcacgcctgtaatcccagctactcaggagactgaggcaggaaaatagcttgaacccaggagatggaggttgcagtgagctgagattgtgccgctgcactccagcctgggtgacagagtgagactccatctcaaaaaacaaaaaaagaaagaaagagcatataaatggagtcattaacacatgtcaccctttgagtttgctgctttcactcaccataatgcatttgagactccaaatgcttttgaccacagaaaggttagtggttctgagagcagcctggaaagtcagtagcattcctatataccatgaataaccactcgaaaatctaattttaaaaatccacaatgccaccaaaaaaacccccaaaacctaaagtgcctagcagtaagacaaaacatgtacaagatctttatggagaaatttacaacatataataaaaagacattaaagaagacatgaggaaatggaggccaccatgttcacaaagaggaaacttgaaaccataaagatggtgattcttctagtaaattttatgaatacagtgaaattccaatcaaaatctaaataaggttttatgtgggacttgacaaactatcatgaaatttatatagaaaaacaaagggtcaagaatagccaagattctacattgaaatttctaataaaaaaaaagaatggccaagacaattttaagaatatcaggattcattataaagtcatggttgttaatattatggttattataaagacaccgtggtataggtgcatggttagacagtagatcagtcaaatagagagctgaaaataatacctatgcctattggaaactttatgtatgacgggtagcactgcaaatcagtgggatgggacaattgggatccatatagaaaagaataaaattgaattcctaactcacatcatacataaagatcaattccaaatgaatgaaaatctagtattgaaaaagcaaaagtttaaaactcttgtaagaaaatatacgtgaccaggattttctcaacaagatagaaaaaatctggaaaagactgatatatttgtctatataaaatttaaagctagaaagcaagaaaatgcaccacaaaccaagttaagagagcttatattgaggaaaaacatttgtaatgcatatgtccgagaaaggatttatacccaaaattcacaaagaattcctaaaaatcactaagaacaagataaactaatggagggatataaacagggtagttaagcagcccaaatggccaaaaggcataaaaagttgcttgacttcacctgccactgaggaaatgcaaattgaaacaaacatgggataccattttacacccatacccatcacagtggcaaaaatctaacagtctgactatataagtttggcaagaatggggagtattaaaatcttagacacttgcaggaaggagtataaattggtacagtcattctggcaagtggttttgcattatctggtggaagatgctgtaaattctgacccagcagttccacactatgtagataccctagagaaggtctcaaatgtgcccaaggagacatgtataataatgttcatcacagccctgtttgtaaaggggaaaaataaggaacctaagtatgcatcaacagaataaactataatatgttcatatagtaaagtggtacacagtagttaaaaagaatctaaaaaaactggatgcaggtggcacatacctgtaatcccagctacttggaaggttgaggtgggaaatcagtgaatccaggagttcgggaccagcctgggcaatgtagcgagaccctgtgtcaatacaaataaataattttaggctgggtgctgtggctcacgcctgtaatcctagcatttgggaggccgaggcaggtggatcacctgaggtcaggagttcaagaccagcttggccagcatggtgaaactccatctttactaaaaatacaaatattagccaggcatggtggctcacgcctgtaatcccagctactcaggaggttgaggaaggagaatcccttgaacctgggaggtggaggttgtagtgagctgagattgtgccactgcactccagcctgcacaatgggagcgagactccatctcaaaaaaataataaaaataaaataaataattttaaaaaatgatctagaaagacaagtgtcaacatggattgaatttcaaaaacataagtttgaatgaaaaaacatatcacagtggaatacatctagtgtgattccatttgtagaagatgtaaacaggtataaacactttttttctgtttatgcatggctcatgtagttaataaaaacatagtgagaatgataaacaccaaattcaggatagtggtgagttttggggaggaggaaaaggattgtatcaggaaagtacatataggggatttcaaatatatctgctgtgtgttacagttttctccagattaagaattatagcatatttattggaatgccaaaaggagctgaagaaccaaggagcattcttctgttagacagcgaaaacagtcttggagattaatgctcataaaaagtgataaaaatggatttatatgtttttagaaagtatcttcagaaaacataattcaaaattatatttttattaagaacacaaagcacaaaacatagtgtaaattttaatacattttaatgctcagatgaaacactgtgccttcatgaattggaagactgtgcaaatttattttcttgggtactgtacatcatttttaaaaattatgaaataaggctgggtgcagtggctcatgtctttaattccagcactttgagaagctgaggcgggtggatcacttgaggccaggtgttcaagaccagcctcgacaatgtggagaaaccctggctctactaaaaatacaaaaattagccagatgtggtgatgcacacctgtaatcccagctactcaggaggccgagcaggagaatcacttgaacctgggaggcagaggttgcagtgagcagagatcatgctactgcaccctagcctgggtgacagagtgagactttgtctcaaaaaaaaattatgaaataagatgtgtacagttttatatatatttgtcattataaagcaagtgctcaggtcaagaaacacagcattccagaagcccttgtgtgacatacaatttcttcagtgtgatttgttttttaatggtataaagagctgtataaatacacttgttattcctcttacattttaaaaaattaatcttagaaaaatatattgccagcattgatttttaaatttttagcacaatttgggattgggacatgttggtgcaactctaggatgcctgagaagactgtggaaaatactagtttgtttcatggtttgcagaggacttggctacggtcagcaacagcagtgccacagcttgtagttatgccctaggtcagcaatctctctcttctggccagagctccaggaagttgataagcaacttcagagctgtgttttcgctgacattggccagcaggctacgtatgtggtctttaccatttggggccatcccccactatcagagcatttacagtttttcttgggacactggacattttttgagctcttggggttcaaaaaaatgaaccttggggttcaaaaaatgacccttgatggtctagtgaagagtccatggcccaaagaccaggaaacagcacactagtctagaaactagggtttctcagcagtggcacaattgacattttggaatggatgattctttgttgagaggggctgtcctgtgcatgataggatgtttcgcagcatccctggcctctactcactggctgccagtagcaccctctcagacaaccagagtgtctctagacattgcccagattaccctgggaaacgagatcaccccagtggggaaccactgcatcagagtgtagtattcacacgaggctcatgctcccttctcgatgccacagctgtggaggaggtgggtggggaggcaacctgaatgaagacccctaacttggagcaagaggaggagtgaagggcaaagataagggaaatgctgcaggcagatccatggagcctttacacagagtcggggcttcagggtaacagttaatgacagtggggggaagagagggtgggcgcagagctgtgaggtgcaagctccgttcagagataaccgagagaagtgtgttagtgcagagcctggtctctctggaggatggcactccagccttccatcttccctctgcttgagcccagcttgagcattaaaggagctttagaccctcttatcttaccacattttttctgacttcctagaaagttacgtgagtctagcaagtgggctgagttccttggagacagattgaaattgcttgttactcaacagacatttcaagcacccacttaaagggggaggtgctgtgccaggcacgagggaccctcctgattgcccaggactatatgatctgactagggagacagactcagccagcacaggcagccccgggagaaggcaggctctgttgtcaggctgcctgggttcagatcccagctctgcacctggctgatgtgtctccttgggtaagtaatgatgctaagcctcggtgtcccagtctgtaaaatggggtagtaagaattctttttccctatgtatttgagaggattaattgaaagagtgagtacagcttgtagaacagtgcctggcattagtgaacactcaatgatataataatattattttaaatgttttattattgctgctactacataaggcctgtcacaggcttaaatagtatcaagaaaactgagggggcagtaaccaaaggcttcacagaagaagtggcatttctgagatgggtcttaaaggattagtggcgctttatcaggaaaaacaaaagagttgtgggattgggaaagatcctgtgctaacattcagacagaagaaagagcagccagaaagtcacagattgcaagtgaatgtggcttaatcaggggacagctgctggctctgtgaacccaaggctgagggaggggtgggaagcaaggccagtgaggccggtggagaagggccgtgtaggggtacttggtctgaaggagcagaagtaccaagcccttttggcttgagcctgcttccttcattattccttatttccaaaataggttaagaagaactgaccattttcatcccatttccccttccccagggcagtgagatgctaagtgttactgagcttttagaaaccgaaaagcaaacttgtgtgtagggaccttgtgctataacacaggagccaggcggaggatgctggcaaccagctcactccagaagagtccagctgacctagcacaggccttcctgtcttgccttccctgctctgtgaccattcagagggtgtcacgacccacgggttcacggggatcccatcaatcagctcctgggtagcgctgtacttcccacctgtctctcctctgctgctcacatgctgtcccagggcaggggctggaaaccatcctggcagacatgggtaataaccatggcacctgtgcctgaggagtggtgtatttatttccccccagtccatggcgttgtgcccgaggctttgctgaatcagcctggtgctgtctggcgtccacctcgctaccgagacctcagtcccaaggtcacgagcgttccctggatggtgctggctttggcttccccattctgatacttcacacagtgaacacgtacttactgagcccttcctgctgtgcagggcacaggggtgtgttatgaatgagggacaccatctctggctttgtggaacacagtcttgtgggagagacgcaccctgagctgaccaagtggatacagtggacaagagctaagaaaggggcaggtacaggagctaaaaacggagaggagcccaatcgtcagggggggtgaccaggtcaggaaaggcctccccgaggaagtgaggctcctggatacctgagaatgcttaggagggggcaggcaaggaggcagtgtggaggagtgtggggaccttcctcaccaagggggcgatgaccaaacccagcaggcttccccagccacctcccccttggcctgcctgctgtctttggcactaccctctcttaaatgtttccccctcacccccaggcctactttttccccttccttccactactctctcatccccccagtggctcatcctgctcttcacacaggtcatttcagccttcctggagggtgggctgctccccaaggtagtgcacagtgatcgcaagaagccaggcttggaggaggctggcctggctgggctccagcacctgccttacccttcactggtcatgaggccttagacaagtaagtgactggctgctccgtgcattggagtcctgtctgtaaaaggggttcccttggacaaggcagtctaagtgggataaagctctaaagcacttcgcacaaggtatgtgtgagtcaagagttaacagccctctccctttcagtgccagaaacggacttggttcagttaactttgttttccctggaaacctgatgattgtggaatgtcagggtgttccctggcaacagtgctcatggtaaagctgacccctgcttggtaaattgcttctggactaggagttctctcaatacccagtgaactacagctttgggtttcttcagtgtggtgtcttctgtaactaggctggctctttgcagggactctgaaagctccgtctgtggggttgtcacaggagatgtcagctcatatagtacctgggccaggcccactcctgcacctagtcagcttggccttaagttggcacctggggtgacctcatctgtcaggtgaaaagattaaacctccagctcgattcatttatttaaaaatacctgttgagggcctactatggggtaggttctgggaacacagtgttgagcaaaacagatccattatctgccctcaaggcacttacagtgctgtggaaagagggctgtcaatcaaaacattacacaaacaacaataaaagaacaccctgataataggtacactgtgctatgagtgtagtggggaggtttgagctagttagggaggccagggaagaagtcatattggagctgggatatgatggatgaacaggcattaaccagataaagaagggggaaggaagactccagaaggagagaacagcacaggcaaaggctttctgggtgggggatagtgcatggtggagagaatgagggcaggtggaactctgccgttcaggtcctgagaggcagggctgagcacaagatcatttagtgacccaacgcagccctgagcatagatcagtgagagctgctgcccaaacagtgtcacattgctggtatttttgcttcttcatcttaagagcaatgagaaacaggctaatgcaagatgggatgtattggtgggaggagggcttggcctgattggatttacaatatgaaatgtgaagagtttattctagctgcaggatgctgagatcaagtccaaggggagtgaaatttgaggggaaaggttttgatggagaaagaagcctgaggtgtttgcaggcttaacagagcttcagaggggggttagcagcaggagaggaaaggcagcctttaatttcaggggtcttggtgccttcacatccccatttttggcttccatgacccccaaccacccttccatgttgccagaccacaggttgaagggaggtgggtgtgggctttaacagaagatagaggtgcccaaggatgccccagccacgagcagaacaccttcagggcattcataaaaataaatcaagccccacagcagcactttctgtagcttagagagttgctcttggcattgaagacagacattttccattaaataagataaatgaaaaatcgtatttatttttgtctctcttccctccaggcttatatttggcaccctttaccctgcgtattattcctacaaggctgtgaaatcaaaggacattaaggaatatgtaagtagcactgtgtattttcgagcgggttggctggagtcaggtcaggtgtgaaatgttgggagaaggggatgccctccgtgctatgggcactggaagcagggaaaaggagttccttcatcacagttctcatgagacatctcaggagtcctcttttctgtctagaccttcccctgcctagacctagagcgttgaggtgagaaaagcagggagatacggcaagaggctgtggcatctggaattggaggtttctcagctgtgccacaagccacaggtgacttcacctctctcagccttgatttatttgtctggaaaacactctgtagaccttaaagcaccgtgatggagaaaaagtccagcatcgcaggcaggagcacaggttttagagtctggcagacctgggtttggttcctggttctgcagctctgcccccattccatttctttcattccaaatccacaattcaggctgtgttgctctataaccttctgaaggcagaggatttttatcatcctatatctgttttcatagttttgttttttgagccggagtctcactctgttgcctgggctggagagcagtggcacaacctcggctcactgcaacctccgcctcccgggttcaagagattctccagcctcagcctcccaagtagcttggattacaggtgtgtgccaccacgcccagctaatttttgtgtttttagtagggacagggtttcgtcatgttggccaggctggtctcgaactcctgacctcgtgatctgcctgcctcggcctcccaaaaagcggggattataggcgtgccacagtgcccggcccctatatctgtttcctgtagcacattgcagaaggtgagcacataggaaggggatctgggaggacttactggtcagaggataatctcaattactgttggatgatctgggtgccctagtcaccagttctgaatgtgttgggcaccttcaggcaggagaaccattagaccaccgctgactgagaaagacctgctgggtgggtggtgagggaagggtgtccttccccacacaggacacaaactcaaaatgcaaaaggtgtggattttggcatcagaagaccgaggttggtcaagtcctggctctgacatttgaatgatgcagtgctggtctaagtagcttaaacttccgagagcctaagtgtcctcatctgaacagtggggtgggtaatagccatgcctttgcctcttttactcagatgtctcttggcaggtttggcgaaggtaaagaaacaattcaaggtgggcttagaaagtcagtattttttttctcagatttcccaagaagtctttatgatgaaaccaaccatctctagatcaactgcaaccagaactcaccccccaccccaccccgcaatctcccactttcccagaacaacttgcctgggcttgcaccttgctgttcgtaagcagggagttccagaggggagcgatttttcttctggagactgggtctgtggtatatgtgagggaatctcagaatgcacgctataaatagctgttaaattgcaagcacagaacctcctgattctcaattgacttggcacagggcaaagcattaagcagcttctcctagccctccctctcccaaccctttcccgcctgcaatctgtgccagagaaggaggccttaccaggatcactgtggtataaggtctaatccttcactttgcaggggcgaaaacaactctgtcagctcttctgagagagatcaaaccctggtaaattgttttgctctgactaaactcacagaagcctggtttatgactagaatggcaattcattaatttagagtgaaaaccataattgatgagcagagcagctgtttgtgttggctgctgagcacatgcttttcccagtagggaacgtgcaagagtttagattaggtttcttggtaaaaaaggaatctgaagaaacaagccgagtagtatcaggagggaactgcctttctctgcactcacactcctgtgtttccttcctgcagtcctttcgactaatgcgcccattttgttcaagagagaaacctgcgagtttccttaacacacccacacccacgccccacccagttggtgaccatgtcccttcatccctgtcgcctgaataatcttccaaaccaggtctgtcgtccttctctgctgccactctcagaaatgagattctcactattttccctagaaggttacagtagcctcctatattagttttttattgtcaccattacaaattaccgtgaacttagtggcttaaaacacctgtgtactattttataattctgaaggtcagaagtccaatgagtcccacttggttaaaatcaagcagggctgtgctccgtttagtggctccaggggagaggctgtgtccttgccttttccagttcctagaggccattcctggattcttaggcttgtgcccctttctcttcctccttcagagccagcaacattgcatctctctggctgttcttccataaccatatctccctcaggctcactgggaaaggttctccactttaaggattcatgtgattacatggggcccacctgggtcatccaggatactcttcccatctgaaggtccttaatttaataatgctacacagtcccatttgccatatggggattaggacatggacatctttggggagccattgttgtgcctatcacacctcctaactggttctcctgcctcctgtccctgctttcccactctgttgccacatgacatccagtgccatttaaaaatgaaagtctatttatttcactcccctgggtcatttaatggctgcttatcacctgcaagatcaagcacaaacttcattacagcatttaacacccttctcaatcttgctcttccctacttcccagtcgcttctctacacgtcttcagcgctgtaatctcaacacccaaggtgtggttggtggccagcattatctgcatcacctgggaacttgcttgaattgaagactcaggcttgtctttctgtggaaggcacagaaacggttatcatgaaggagtttttgacacacattcccctagaagtaggaggcatggcatgccatgtagggccacacaggggaaccaccagggctggtcaggaagcagagggagctctcctaaataaaaatgggcatttttcacaggatctccaatttagaaacattgctcaagacatttatagctgcttatgtctttccaaccaaacttactgtacctggattcaaggttttgggatgaaaacttaaacagaaaggaatttacgggaatttatagaattaactaggtagcaggagaaagatacccaggaactggggaggatccaaggaggctgggtggtgctgacggcccagctcacaccataggaaagtgtgtgattaggaagcctctgccaaagtcacatcttgggcactggctgcttgtgcttttgaggcatcccctgacagtgcacagtcctggataggggcccaaataacaggactttcctcccacaaagatgctcatgttgggagatgtctcccaattttagaaggctttggatgctgagtagtcatggaaaaaaaataaccaatacagctgcctcttaggctaccccaaactacatccacatccattcctttacccacatttcggcttaaaaacaagcttccaacaagaattctatacaactcactcacttgtcaaatccagattccgtaagttgctgagtccagctccaggcccagtatccctgggcaaagtcttctcctcctctggttctgacaagacccaaccttaatattcagcattccgaacactgaattgttaagtgaacggtcaccaatgcagctcacatactattttagtggggagagaaagaattaaaatataattacttaaaatattaaaatctatacttagaaaggaggaaaatatggatagaagatacagtccatattcatgcaactggtcatgagttcatagctgtatttgtgtcttttgttaaaagaaaaaagtttttagagggtggaatcatgactcttgtatgaatataaaatgaacacatgttgaagattttgcttaacttatgaactaatgagggaaccagtaaggtgttcaaaggagaccccaaataacagacatatgtaggcaatcagaaatgttgaaatggatttgttaataaatattaaactgattacttggagggtgggatggggagatcagttgtatctctgctggacaaaatttatttgcacctctgtgggtgaaactatatgcattgcaatcagttttaacttataaagttgtaaaatagctcaaagacattgaaaagcaggacacctgcagaatcaagataattcagaaggacatgctggacacctagcattccacaggatacccattctgaagtctttctcaggttttcctgaggctttcctcttccgccatccaattcatgctcccgttgctttcagctagagctttagtgggatttgttcctcatcctgtgatggggcccaaatctttattcctgaggaatctgaggtcttggcagttttgcctctgtagggctgtagtaatgacccattgactttttttttttttttttgatacagagtctcgctctatcacccaggctggagtgcagtggcacgatctcggctcactgcaacctctgcctcctgggttcaagtgattctcctgcctcagcctccccagtagcaggaattacaggcatgcagcaccatgcctggctaatttttgcatttttgtagagatgggggtttcaccatgttggccaggctggtcttgaactcctgacctcaggcaatccacacaccttggcctgctaaagtgctgggattacaggtgtgagccaccacgccaagcaacccattgacttttacccctgaacaagacagtactaggaggcccccccaaggctgtttgacttccatctgctcttctttctgcctcattgtgtagcagcagtcctggttccccttgataattaggatcagttagcacctcaaagcccataagcccctttatcatctatttcctactggcgtgagtatcgtgaagccaccaggagacaatataagtctctgcttccacttcattgaaaccattttgtatcccctgttggaagcatccatccctcaagtaccaaagtcattaagaagcagagatcagaggtctgaggatgagaagcaaaaatgttgtgagtgcgttagagcagtgattctcaaactttaacatgcatatgaatgaacaggggatctccttaaaagcagattatgatccagtaggtctgggatggggtctgagattctgcatttctaacaggctcccagatgatgccaacagtgctggtccacggacctcactttgattgcaaggagctggcatcaggcttaatcatagattaaggaaccctcatttccttggttcctgcacctttagattctggctaagaagcaccaccatatgttggtcactggttcagaggagaaactgcaccctccaggactgcacaccaatctcataaaatgctgactcccaccttggttgctttcggaaccctccaatgccaggtagcactgtataaggccagccaccgcagggcattgggtgcataagatcaatgactccccaaagcatcagcctattgccttatttcttttgctataaaggagggtccttgatgagaagcagtattgtgtgggatgcatcaaaaggaaaagggtaatccctgagtccacagcttgctgtgtggctgccagaagcagagcagtaggaaaagcaagtccacatgcagaaaaaatgaatattccagaaaagaccctatgccgcccactccatgagggaaggggcctggtggaatgaacctgcttccagaaggctggctggtgccttgtgatatggtatcagcctggagatgcttggtcattgctgctggcaacatggtctctgagcagtggttgtggccaggtcagccttggtgagagggattccacattgctgagcctgtatgctacctctgtcacttccacttggctgtttggtacatgagcccattgaacatgcactatcaagcctgaggaaggaggctggccgacatccacagacctggccatctcatgcacttggtcactaggagcctcctctgctgtgggacctgttggtgagcataagcgttgggccaacaatgtattcattctctgggcccattcacctcattcccagaccacctcaacaggagtctctcagcctcacttcttccaagaacctcatcctctagacagagctttagctggtgtttgaaaatgtgcccgggatttgttttactcagggatggaaagtcacaaagacgtggaaatgactgtcatgaaggaagaagtctagaagtaggagagtcacatgctttgtagggccacatggggaagcaccaggccagtcaggaggctgacggagagtgggaaacgtgggcagtggccttcattgtggtttctgtgagaaaggtaaggcaagacagggtaaacagatttcagattggctaggtggaatcatttcagcaggctccaaggtgtgggcgctgcctctagttgtctgggacctggctctggggtggttatggttggggaatattgcccaacctgtgggagctccataaaggaagtaatttagagtatagactctggattggttagtttgcatatgaaaggtgtgctggggcaaggctagccctggaagggcagtccctctgtaatcattgaggccccagatgccagagcatcaagaatatagaaaataagaaaatggagttcatatacccggtgacagtgcgtgaacattaacttagggcatttctccctccaggctaagtgccctgctcaaagtcctgcctgcaggggaatttcactttcccgctctcctagggtcacccctgactatatagccatccacggtgagcagatggtgcagagtcatctgtaaagcaggcttgaattttttctttctgtcatatggcacagggaattccctgtgaggctgaagcgcagggcccagatgcaagagggtgtgaaaggcttgagaaattgaatgtgcctggttagagcagagtccaaaggtgaggtgaggctaaagaagtagctaagcctgctcctctgcagcccatagggaggcctttggcaggctgccagaagctctggcagtggggtagaatggaccagggaatttcagccagctgctgtggctcatggaaagtctccaggccgcttcctaccctgagctctggagcttcttgctgtggctgagggtcacagcatctttcccatctcttcactcctagatcctgctcctgaccagtttagagagactccccagtcatactgtcaacgttccatttgtccaggagagttactcctgaatattacctctcaaattggccatagctccctctctctattctgactgaaggcccacccaggctcctcatccctatcttgcagggaggtttggatagaatctttcaaacatggaaaattatatttcaaaccttggggaaaataactgtcatttgatttccacgaggaatgatggggaagaccatttcctagtaattttagatggctatggtttccatctctgagtcaccagtgttccgttgaccttgttagcctcaatgagtcattctcagatccttctttctgcatgaaagtatttcaaaggagtgcatcatgggaacttcttcaggagaatgcattaagtcccctctctgccatggctgcagcatctctgtccatagcctcaacctccttcctgagctttggtcttgcttttctaggaatccgttgggcaatcttcttggctgccctgagccacataaagctcaaactcttctgcctaaattggctctttctttactttcttgttggtgcaagtggccccataattatcagtctctgatgtcctgacttcaacaggtgcctttcttcctatgtttatgcagtcatcaactcagtaggcactcatagggagcatctgttgcctcacaagttgtctaattctgtcttttcttctcaaaaagccatctagacagtatttctcaaagtatactctttcttaaccttttgaaaccattctttctgtcccattcacagtgccagcattctaatccggtcatttgaaacatactcattcagtacctattatatgtcaggaattgttttgggtactagagatataaagatgtataaggagaactggtctccaccctcagggagcttacaatgtattaggaaaagcaggggaataaacaggtactttcaaagcagtgtgataaatgttatgacagggaatgtgtgtggtactgtaaagaaagacaaggagagggtatttacccaaacttcgggtatgtcctagaggaggtcacgtttttgctgagatctgagggctgaaatcagacgcaaaaaaagatgctttgttgagaactgaaagactcatatggttggagtggaaaatgtgagagggtaggggtgtggatgagcttttgatgaaaataattaggggccagtttgcgggtgtggtggatcaagcctgtaatcccagcactttgggagactgaggcaggtggattgcttgagctcaagagttcaaggccagcctgggcaacatggtgagaccctgtctctacaaaaaatacaaaaaaactggccagccttggtggcatgcacctatagtcccagctactcaagacgctgagtgggagaatcacttgagcccagcaggtcgagactgcagtgagctgtgtttgcaccacagcacttcagcttggatgacaagcgagaccctgtccccctcaaaaaaaaaaaaaaaaaggtaggggccagttcatgctaggcctcataagccaatgtaaggaatttgggctttatcttaacaacagtaaggaactattgaaggctataaactaggaaagaaagtcacccgctttaggtttaagaatttttttttttttttgagacagggtcttgttctgttgccaaggctggagtacagtggtataatcacagagctgtgattatacacagcactgcagccttgacctccccaggttcaggtgatccttctgccttagccaccctggtagctgtgactacaggtgtgcatcaccatgcccagctaatttttgtgtttttttatagagacggggtttcaccgcatttcccaggctggtctcaaactcctgggctcaagtgatccacctgcctcagcctcccaaagtgcggggattactggcatgagccaccatgactggccttaagaaaatcattttggctggaatttggaggatggattgtgaaggggacagaggtgtaaagaccagcataaagttgtaactattctaaacaggagatggtggtgttctgaagtaaggaaatggcagaggagaatggagaaaataagacaggttcaagaaaaatacaagagggtggaagtgacagaacttggggattggttacctgtgttaggtgaggaatgtacagttttccctagggacagtgtctagtctagagttagaagcagatgtctagaacagagctctagggaggaaatgaagacactgagaagaagtggcaagaaaagcaattgggaaaccaggacaattgtagtgttgggagagcttttcagtatgtgattgtttcactactagccaaaaagtcaagcaagccaagtaaaaactgaaaagaggtttcttacacttccttgaagtatgttacaaagtggaggccccagtgagagcaattttgatgtaatggatgcactgcagtgagcaagtgaggaatgagaaagtagatcttgcaagtatagatgactcactggagaagtttgtagctaagggttgcatcaaggaaagggatttttaaaaaattttctgagatggagtttcactcttgttgcccaggctggagtgcagtggcgtgctcttggctcactgtaacctccacttcccggattcaagcaattctcctgcctcagcctcctgagtagctaggattacaagtgcgtacaccacacctggctattttttgtatttttagcagagacggggtttcaccatgttggtcaggctagtctcaaactcctgacctcaggtgatctgcccgccccagcctcccaaagtgctggcgttacaggcgtgacccaccacgcctggccaaggagagggatttttaaaattgttatcattgtccttttgctctaattgaagacccaaaacatgaattgactactaaaaagaaaaaacctataaagaaggaattcaggctcctgacaatgtgtctggatactgatgttgagaattcccagatcctgagccccagcaggctatagactttaccactggacaaaacctcatttgccccctgctaaggagtcagtgctgctacagacaacctggcagtgtgcagtgtctcagacagtagttatttgatggactaaacctaccttgtttttctgatagagaagatctgtaagtaatccattgagaaacatgttttagagtcacaaagacaacatggattcaccagaacagctttcattttttgaaagatatttttgctgggtatagaattctaggttgacattttttttccttttagcactttaaagatgttattccattttctctgatagtcattttttccaatgaaaagtcagctatcattcttattctcattctcttgtgtgtaatgtatctttgcatcctctctgcttttaagattttctgtatggtaatgatttttctttttttctcttcttttctttctttttttttttttaagcagttttactatgacttgcctaggtatggttttctttttctttgtatttatcttgcttgggattcactgagcttcctggttctttgggtttgttggtttgtttatttgtttatttttttgtttgagacagaatcttgctctgttgcccaggctggagtgcagtggcatgatctcagctcactgtaacctttgcctcccgggttcaagcaattcttgtgcctcagcctcccaagtaactgggactacaggcactcaccaccatgcccagctaattattatatttttagtagagacagggtattgccaagttgcccaggctggtctagaactcctggcctcaagcgatccacctgcctcagcctcccaaagtgttcccatcacacctgatcagggtttgttattttttttttaatcaaattttagaactttgtagccagtattcttcaagtgtttttttttgttctccattctcatgtttctttccttctggaattcctattacatgtatgttagactgcctgatgcagtccaacacatattgagcctctcagtgttgttttccaatctaggctttagtctgcatggctttagtctggatttgtcttcaaatacacagatcttttcttttgttgtatccaatatgctgttaattctgtcatactgtttcatttcagatattgtgcttttgaattctaggatatcatttgtttcttttttaagagtttccttctttctcttgaaatcccccatctctccactcattgtattcacattttcttttagattctttaacatatttatactttttaaagaaaaatatggctgggcacggtggctcacacctgtaatcccagcactttggaaggccaagtgggtggatcacctgaggtcagcagtttgagaccagcctgaccaacatggagaaaccctgtctctactaaaaatacaaaattagccaggcgtggtggcgcatgcctgtagtcccagctactcgggaggctgaggcaggagaatcacttgagcctgggaggaggaggttacggagaactgagatcgtgccattgcactccagcctgggcaacaagagcaaaactccatctcaacaaacaaacaaacaaacaaacaaacaaacaaacaaacaaaagaaaaatgatactgaacgcatccttttcctcctaggataagtatcttgttatgtggtgacaaaacaaaagtttagttttcataataaaagttttgttaataagttgctgtatatctgtatatcttctttgtggagtgtctgttcagatcttttgcccattttttaattgggttgtttgttttcttattgttgagttttaagagttctttgtatatgttgaatacaagtcctgtatcagatatatatcttgcaaaatattttctcccaatctgtgggagaaaattgagttgtttgttttcttattgttgagttttaagagttttttttttatattttaaatataagtgctttatcagatatgtgttttataaatattttctcccagtctccttgttctctaaatgttacctgtgcagagcggaagtttttaattttattattattttttcctgaccacctattaccatcatgtcctgcactagtgtttcaggtttatttttaaatgtcctttgctgggaggaaggggccattcagttggttgggagcttagaattttatttttggcttataatccagtatgtagatggtttgctggtagcctaagaatcaaaagagcaatgcaaaattgatactttggcttagttagaattcctcacccacagggacttcagacctcactggacaaattgtaatttgtcaaaccgaagtaaaatatttaggacatttgtcactgaatgccataaagtgttataatctaggagttagctaattttgcagatgaaatggcaacaacaaatataacttagacaatttgggggactagtaggatattttccacagtggagttcagggtcaaaggcaaaattacaacaaatttagtttaaatacctcagttgactttattatgagcctagaattgggcaacacttcattctataaaatagaacaagtgttctaacaagctgagctgaagggattggctttatagacagaagggatgaagaaaaaaggttttgaattttaatgaagtccaacttaacgatttttttctttcatagatcataccattgatgttgtatccaaaaactcagtgccaaagcccgaggtctttagattttcttatatgttgtcttctagaagttttttagtcttgtgctttgcatttagacctatgatccattttgagttaatctttgtgaaagatgtaaggtcagtgcctagatccatttttcattgttgttattgcatgtgaatgtccagttttcccagcatcatttgttaaaaagaccatcttttctctactgaattgcttttgctcctttgtcaaggatcaaatcactatacttgcgtgggtctatttctgggatctgtgttctgttccatttatctatttgtttatttttttaccagttgcacatggtcttgattattttagctttacattaagttttgaaatctgatagctttagtctttcaatgttgttcttcttttgtattatattaattgttctggtcttttacctttccatataaactttataatcggtttgttgatatccataagaaacttgctgggattgtgattggggttgcattgaatctatagatcaagttgggaagagctgacatcttgacaatattgagttctcctatatatgaacatgaaatatttctccatttatttagatctttgatttctatcatttgtatagtttcctttatatagactttttacatatcctgtttgatacatttctaagttattcatttttagatggtactaacataagtagcatttgtgttttaatttcaagttccagttattatgtaggaaagcaatggacttttatacattaaccttgtatcctgcaaccttgctctaatcatttattaatcccaggaggatttttttggtgagttccttgggattttctacgtagacagttacaccatctatgaggaaaaatggttttatctctttcttcccagtctgtatatgttttctgtttcttgtcttattgcattatctaggacttccattatgatataggagtgatggaagagaataactttgccctttttctgatcttaggaggaaatcatctattttctcaccagtaagtctaatgttagctgtagggttttaaaaaaaatatgttctttatcaagttgaggagcttcccttctatttctactttgctaaggttttttttttttaagtcacaaatgagtgttggatttttttcattactgattcagtttcttaaatagactatgggccctttgcacgtttttaactgggttatgtacccttttattgttgagttataagagttttttatatatttagatataagtaccttatcagatgaatgatgtgcaaatattttctaccattttgtgggttgtgtttttactttctcgatggtgtcctttgaagcaaaacagtttttaattttgatgaagtctaatttgtcttctttttgaggtaggatcttgctctgttgccctggctgaagggcagtgacatgatcatagcttactgcagccttgaactcctgggctcaagccatcctcctgcctcagcctcccaaatagctagctaggactacaggtgtgtgacaccatgcctggctactttttgagttttttagtggagacagtgtgtattagtctgttttcacactgctataaagaacttccctgagactgggtaatttataaatgaggtttaattgactcacagttctgcatggctagggaggcctcagggaacttacaatcatggtggaacgtgaaggggaagcaggcaccttcttcacaaggtggcaggacagagagagacagcaaaggaaactacctgttataaaaccatcagatcttgtgagaactcactcaccatcatgagaaccacatgggggaaaccgcccccatgaaccaatcacctcccaccaagtccctcctctgacatgtggggattaaaattggattacaatttgagaagagatttaagtggggacacaaccacacatccaaaccatatcatgggctctcactatgttgccctggctgatctcaaattcctggcctcaagcaattctctcatcttggcctcccagtaaattttttagtttggttgtttttttttgttttttttttcccctgagacagagtcttgctctgtcacccaggctggagtgcagtagcccaatctcagctcactgcaacctcttccccctgggttcatgccattctcctacctcagcctcctgagtagctgggactacaggtgcccaccaccatgcccggctaattttttgcatttttagtggagacggggtttcatcgtgttagccaggatggtctcgatctcctgacctcgtgatccacccacctcggcctcccaaagtgctgggattacaggcgtgagccaccacgcctggccttttagtttgtttttttgtgtgtgtgcttttggtagtatatctttatttatttatttatttattttattttttttatttttatttttatttttattttttgagatggagtctcgctctgtcgcccaggccggactgcggactgcagtggcgcaatctcggctcactgcaagctccgcttcccgggttcacgccattctcctgcctcagcctcccgagtagctgggactacaggcgccggccaccgcgcccggctaattttttgtatttttagtagagacggggtttcaccttgttagccaggatggtctcgatctcctgacctcatgatccacccgcctcggcctcccaaagtgctgggattacaggcgtgagccaccgcgcccggcccttttggtagtacatctaagaaagcattgcctgatccaaggtcagaaatatttaattatatgtttttcttgtaagtgttttatagttttaactcttacatttaggactctgatccatttgaagttaatttttgtatatggtatgaagttgttcaactttattattttacatgtggatatctagttaactcaaaacgtattgataccttttaaagcccttgtctgctaattctaatatcgaagtcatctgtggatctgtttctattgaccaatttttctcctaaccatggattatattttcctattccctcacgtgtagtattttattgtatacagaaccttgtgtgtgattcattgtggaaaccacagatattttatacatttttcttatttttttgtgtttatagctttagggggtacaagtgcaggtttgttacgtggatatattacatagtgatgaagtctgggcttttagtgtaaccatcacccaagtagtctaaattgtacccattcggtagtttctcatccctcatcccctcctaccttcccaccttttcaagtctccaaagtctattattccactctctatgtccatgtgtacacattatttagctcctatttataagtgagaacatgcagtatttggctttctgtttctgagttattctacttatgataatggactccagttccatctatattgctgcaaaagacatgattttttattatggttgggtagtattccattgtgcatatatatatatgtatgtatatacaccccattttctttattcagtcatccattgatagacttaggttgtagatttttttttgccttcttgtgaagaatgttgagtgttgttctagcaggcagttaaattcaggcagatcaccttgaccctgtggcagctagatacgttttgtttgggcaggtatatttaaattttgctcttagtcatagagttaatctcttagtgttaggatgtaatttttattgctaagatgtggtcttccaggtgtttcactggaaattccaaatgcttaccaaacccctctaactttgcatgacttgaattccaaactttgtttccccaacagtgggcagaagctaaatctctgctcaactctgagcttttcagctttccagctgtttatatctacatttatatctatatgtatttatatctatattattatacagacttcttcgcttggagtcttacctgcttctgtgcatttcagggacctgccaagtttttgaagagaatttatatgtagatttttggggtgcccctttatggcttccctaattctgagatttttctctgtccacttccagcatctctggcagtctcaaactgcattctccttttctttggacaaataagactctggatttgagattgagttctctctgccccatgatgtgcagagtgaggactgtcctcagccgcactgacttgtactaacccagtgtggttcccgtgctccaaagcttgaaccccttccagtctctgtctgctttttatattgctctccagggccttcaaacagttgttttgaaatattttgtttggtgtttattatcattattagtaggagccttagttcaatataagctacctcacttttgccagaagccagaaggagtagactaaggaatctggacttgattctgcaggctgggatattttaaatggggtgatagtctgatgagtttatacttttgggagaatagtacaggggtggcttggtattaggatgggttgctgaggggaaagtcaggaaacaagggaagtaggagtagttcaagagagaggggacaaaggccttaggggagaaaggcagtagaaattgaaaaggatggtcacatgggagagataaaaggaagatcagaattcctagattactaccatgccatcccagagagtgtggcccagttacacttcattccagggtgtgtttgtgtagaggcctagagcattttctcccctgatgttctgaaaaatgacctgattgaatcctgggtcactcttggtccgcaggtctccccggctcactttagggccatatgaccttcagcctgagtcagttgtggaacagcccatttgcttccagcttcaagatctggagcagaactggacataagctggggaaggatagggagaaggctacaaatgcaggctgcaccacctggacgtgcctccgtatctgccgccggggcctgttcttcctggtgttgggcagtgtttttcctggaccttttctaccagctgtgttgctttctgtttcaacaggtcaaatggatgatgtactggattatatttgcacttttcaccacagcagagacattcacagacatcttcctttgttggtaagtactccaggagttgggatgtttctaaggacaattttgcttagtgtcactcagggggaggtgggaaagggctgaacccagcctcaaacctcacctcaggccagagacgcaagagcagggatgttaactggagcatttttaatagattagtccacaaagttgttcttcaagtaaatatttattgaatgaccttataaagagcagttattattctaagccctggggatatagtcatggacaggacagatacacatcctcaattaatggagttggtaaagaagcattcgtacgttaaaaaagtaaaggaacaaaagaaacaatgcacaaaaatgcacaggaaaaactgagtttccttctcactcaattcatggtcaacataatcactactcacagttgtgtatcctcttaaaaaactaatatatggcctaggtgtggtggctcatgcctgtaatcccagcactttgggaggccgaggtgggtggatcacctgaggtcaggattttgagaccagcctggctaacatggcgaaaccccatctctgctaaaaaaaaatacaaaaaaataattagccgggcatggtggtgcacacctgtagtcccagctacttgggaggctgaggcaggagaatcacttgaacccaggaggtggaggttgcagtaagccaagatcgcatcattgcactccagcctgggtgacagagcaagactgtgtctcaaaacaaacaaacaaacaaacaaaaactaatatatgtgtgtgtgtatacacacattttacacacacttcttttttttaaaagcagtattatagtatacatgagagttctcactttgcttattaaatttattttggaaatacttttatatgagcataaatacatctacctaatttttaatggctacataatatttcatggcatagatggagcataatttatttgtcatccccttttgatgggcatttaagttgatacccatatttttctcttatcagcaatgcagctatttccagcaatgaagcaattaaaaaacaagctagatctttgtattgctgtattgtgccttcttaggcgaaagaagctgtaaataatatatcgatttctgtttgtatttaaagagttgagtgtgtgcacatgtgaatgtgtattaaaagtagtgtggaaaatatagttaacgagggttatttctacgacttgggatcatggggttggttttgcatttgctgtgttgtacgaatgttttaaccatggtgaagtgtgatcagagaaagtaatcaagatatttccactttggagaaaacaggttcttacccaaaaaggatcagtatgaaattaccctctgggacgtcctaggccaaggaatagacctgaatagcactctctgaatcctgttttgagtcaatggccttaattatcttagcatgtacttttccccacaacatagctttcacctccactgagagaagtagatgtcccagccattgtagcctcaagctgtagtgaaggagtatggatttcctaattcaatatgcttgtgccttcgcaccctgcactgtgcacaggtagtgcagcagactctggatgaagctgagtctccttaagtgggacagagctctctgctgagccatcccttgtctccccgagaccttgaggctggccctggaagtcaggccattttgtacagagctgcatcaggaaatgaaggggtgggttgcctctccacacctgtgggtgtttctcgttaggtggaacgagagacttggaaaagaaaaagacacagagacaaagtatagagaaaaaaatagggggacccagggaaccagcgttcggcatatggaggatcccgccagcttctgagttcccttagtatttattgatcattcgtgggtgtttctccgagagggggatgtgtcagggtcgcaagacaatagtggggagagggtcagcagacaaacacgtgaacaaaggtctttgcatcatagacaaggtagagaatcaagtgctgtgcttttagatatgcatacacataaacatctcaatgctttacaaagcagtattgctgcccgcatgtcccacctccagccctaaggcggtttttccctatctcagtagatggaacgtacaatcgggttttataccgagacattccattgcccagggatgggcgggagacagatgccttcctcttgtctcaactgcaaaaggcatgccttcctcttatactaatcctcctcagcacagaccctttacaggtgtcgggctgggggacggtcaggtctttcccttcccatgaggccatatttcagactatcacatggggagaaaccttggacaatacctggctttcctaggcagaggtccctgcgggcttccacagtttttgtgtccctgggtacttgagattagggagtggtgatgactcttaaagagcgtgctgccttcaagcatctgtttaacaaagcagatcttgcacagcccttaatccatttaaccctgagtttgacacagcacatgtttcagagagcacggggttgggggtaaggttatagattaacagaatctcaaggcagaagaatttctcttagtacagaacaaaatggagtctcctatgtctacttctttctacacagacacagtaacaatctgatctctcttgcttttccccacaaggaaactcctgtctgattcacaaagatgagagtagaggccggcccagtcaagactgtgtagtcaattaaatagcacctcctgccatccagcctttcctccttaaccaggccttctgtgtggtgctaggggcctcttctgtcctcccgtgttagtctcatgagcccattcctggggatatcagcatttcagcctcactgctttttgctgggtggaaatcctatctaatgatggctgtgttcctcctgggtagctggaatatgcccttacctgtggccctggaattttagagtttcatatctagtaagtgctcaacaactatttctggaattgatttcattttgattttgggaggcatattagttttctattgctgccataacaaattaccacaaatttaacagcttaaaacagtacaaatgtgtgattccacagcttctgtaagtcggaagtacaggtggaatcatcctctgcttagaatctcacaagaccagaatcaaggtgtgggccagcctggtcttttatctgaaggctctggagaagattccccttccaggcccattcaggttgttggcagaattcagttccttatgattgtaggactgaggtctccgttttcttgacacatgccaccaccttcatcttcaagccaatgatggcctgtcgagtcctgcccatgctttgactctgtgtctgcttctgccaccagttagggaggatctctgcttttgttttaagggctcttgtgattagattaggcctaccccaataatcccatataatctccctgtcttaaagtcgtctgatcagtaaccttcattacatcttggccaaaactctgcctaccacagggggatgtttgatgcctggtgtgtttggagcatgtatgcaggtatgggtagaatccccctctcttcctgacccatgtggaggcctcttctgctcccttatttggtctcttagctgggggtgtccaggcagtttgtgggtgggaagtgagggtcctttgctcttctcctggtggcctgagttctgcttctgcagggaagaggctccttaggaacctttctgcctgctttatcccacagcctgatcatgtcctcaccctgctttctctttttctcccaacctccaggtgtcatagatcctagtcttcttctgggagggtcctctctctccttccttcctctcaccctgagaacaggcacaggatgggcccatcagggaatgtaggaattttgcttcacttccaagcacatgggcaccatctccgcagctctgagcattctttactattcaaaaaggttagggggagagtttctgtcctaaaatatgtcttttgtcttcctagaagcacctttaacttttgttctcttccagaattggagccacttgtatggaccttcttttcctcactcttcgctcacccccattcccctcttcccacttctcccctagggcggatcccttttcatggttaactttgtaaaactttccatcttgatgaaaacaacaattatttatggtcccagaatagataagatggtggcttgtttcacaggttgtagaggtgatttcatttagtttttttttttagttataaaataatacaggctgggcgtggtggctcatgcctgtaatcccagcactttgggaggccgaggcgagcagatcacttgaggccaggagttcgagaccaacctggcaaacatggtgaaaccccgtttctactaaaaaatacaaaaattagctgggtgtggtggtgcagcacctgttgtcccagctattcaggaggctgaggcaggagaatcacttgaacccgggaggcggaggttgcagtgagctaagatcgcaccactgcactccagcctggcgacagagtgaaactctgtctcaaaaaaataaaaataaaaataaaaataaaataatacatacataaggaaaaatgaaatagaaacaatacactgaagagtaagtgtctctcttctcccagacccacagtctccctccctagaagtaccactgtttttttttttagacagagtgcagtggtgcgatcttggctcactgcaatctctgcctccgaggttcaagtgcttctcctgcctcagcctcctgagtagctgggactacaggcacgtgccaccatgcctggctaattttttgtattttcaccatgttagccaggatggtctcgatctcctgaacttgtgatccgcccacctcggcctcccaaagtgctgggattacaggcatgagccaccgtgcctggcctggctagtaacactgttaaaagttacttgtgttttcttttcttccagaaatgctctatacacatttattgcatgtattttggacagtttcatcccatgtctaaccctcttagaacacatctgtccctctagagtgtctgggtgttatatggggagagtggggagaggacaactgccctgtgctccagtgctgtacatatgccttggaaaagatggaggaaatgtggtgggtgcctctggccttttcaaatacatctcagaggtcagggctcttcaaggagttctcattacaaaatgagtagggcctttctctgtctctcgaggtaggctggaagaagacttggcggggattgtgttggtagagccaagggaccccaaggcctctaggagacacagggtctgagtggatcagcctggattatcttgtgatgcctggcaaggacctggttttgtatgtgatgattccagaggcagcaggactgttcccctccatcccacgcccctacacttcagtgacagagattttaaggctttatgtggggagggcctggctttaaatccggagtcagcatacttttttttgtaaagggccagatagtaaatgttttgagctttcaggccatatgatctttattgcaactactcaactctgccattagcatgaaaggaaccatagacaattaataaatcattgtgcataacagtgttctaataaaactttatttataaaaacagatgacaagctggatttggcccatgggccagggttattgggacccctggatccattctagcaagcaacagagacccctctgacagactcaaggaaaagaaaacaatgacgctctgttggtagatgctgaagtaattcacagaataaaaggaaaagctgaaacactaagactctggaaagggaggagccagagtgcctcaggaaccctagcactgaagcgctgatagttactcccctcagcaccgttcacaaagaggttcccttgtagctcggctgaagtaggtaaagatcataaccatcgtaaatatccattcatgggggcctgagccggtgctcatacactcgtatgcagccattaagatgagtgagataggccgggcgcggtggctcatgcttgtaatcccaggcgggcggatcacctgaggtcaggagttcaagaccagcctggccaacatggtgaaacccccgtctctactaaaaatacaaaaattagctgggcattgtggtgcacgcctgtaatcccagctacttgggaggccaaggcaggagaattgcttgaacccagaaggtggaggttgcagtgagctgagaccgtgccactgcatttgcagcctgcgcagcagagtgaaactctgtctcaaaaaaaaaaaaaaaaaagatgagtgaggtagctatccctgtggtggtatgagatagtccccaaggcatactgttgattgtatgtatgtgctgggagaagcaagatgtagtaacgggtgtatagaatgcttctgtgtgttgggggcaactcagggagtcatatatacctgcatgatgtatccctcgccctagtctacctctggaaggatatgcaagtaactgataatgtttttgcttttagaaaagggactaggggttaggcgggggaaggagactcttcgttgtatactcctttggacttttagaattttttttaactatatgcatgcatgacctattttttttaaaagacatcttttatgtaataaataaaagagctgcagtgcgacagattatttatgtgtcttgtgttggtgtctgagcttgctggattcatttcctttccccttggggctggtgaatacttgttttcaaaacagaagttcctccgttattaatcaccagagtattcaaatatgggagaatcacacctctgttcttcagcctctctcttttctggctgtgaaacattaaacaatcttgccatgaaagtgcccactaattgctgaggaaatattcaggaagcacccaccagaggcagaaggcagggggccaggagaccttggtgaggaaaggaggcgtgggtaaggctactgactgggggataggggtgtctgtgtgagagttaagggccctccagtgacttgctgtttttgattttctgatcgtttatctggggaggatgcctggaaaggactttctgatctctaagactaggacaggtgactgtctcatctcatagcatcaggttttaaggatacctgggatttgttttaagcgagtgtgggtaagacatagacatggaaataattgtcacgaagggagaagtttctttgctcacagattcctagaaacagaggcacagcacaccatgcagagccatgttgggggccactcagggtccgtcaggagaagagggagaaactggggtgagggcctttaacatgttccacattaaaggaaggaaagggcaaagcagggtgggcaggcttgggcttggctggtttgaataatctcagtaggctctggggtatatggggctatctctggttgtctagccctggccctgggatgattggggcaggtggatggtggcctggaatgtgagagtccatcagaggcagtggctggagcctgggcccatggattggttggtttgcatatgaaaggtgtgttgcaggtgaagttctttttttttttttttttttgagatggaatcttgctctgtcgcccaggctagagtgcagtggcgcgatctcggctcactgcaacctccaactcctgggttcgagcaattctcctgcctcagccccctgagtagctgggattacaggtgcccgccaccatgcccagctaatttttgtattttttagtagagacggagtttcaccatattggtcaggctggtctcgaacccctgaccttgtgatccacccacctcttcctcccaaagtgctgggattacaggcatgagccaccgcgcccggccagtgagttctttactatctctagcaattggctcaccttgtgggaggggcagttcctccagagtaagcaaggccccaaagtacatcagaatacagaaaatcaaaaataaaccataaacacatggttactacacctctggactgccaaatatggttgctcgggttgttcacagcacaagatatctggccaagcaggtgaatggggctgaaattcagaccaagctctgtggtatgtggccacagaactgcttccagttgaagaggccagttttcttctaatacattcaaaggcaccacgtgggctagcactatggcacttgtctcaggtttctgttctatattatttgtgattattttataaatctctgtttccctgactggacccttagttccaaggatgccagaatcttgtctgtgttcccagtggaccagaagctccatgagggcaggaatcaggtcttctttgctcaccgttgcctccctgtacctccttatacctggtgctcagtacaagctggcacgtacagggactgggtgcctgcctgtggggggacaaataaatgaacaggcttgagggtatgcaggactgcaaactccagaattatgtgctatctgcaccgtggactcttctgtttcttggcactaagaagatcaaaatctgtttgcctgccattgacttgagtagggtgagtagcattctccttcctgccaagagctgggctcttgtccctgcctctgtttgggccaagaaggcagccaagaaagagaggctttcattctcagtctagagatttttttgtcaactcttccctgctgtaattccccctggtgtttgtcccttcttggatgtgagtgaagagtgagtgactgggtgtacagcgtagaagagatcctctgagcctgtaggctgtggccagaaccctagctccaatctaaatgagcacagcccagcaggaagctccagcctgtgccaggcagggccacgggggtgattgctggagagaacctgtgttcctggtttgctttggcaacaaaagaaaacacgaactggttttcaaagagaggcgttggggttgtactgtgtgtgtgcaagtgtgtgccctcaccttcataggtggaggacagaggaatctgggaaacttgcagccacatgcaagcaggagaggcgtccttgccacccaccgggtctcatccttcaaaagggcagtgttgctgagaacctaacagaacttgtgttttcatctctctctccaggtttccattctattatgaactaaaaatagcatttgtagcctggctgctgtctccctacacaaaaggctccagcctcctgtacaggaagtttgtacatcccacgctatcttcaaaagaaaaggtaatatatgctgccatgtctttcattctttctagcaagtgagaaaataagtaataaataaaaagggatgatcttattgcaggagacttctcatttggctctcatttgcctccagcaagtcattcctcctaatcgttttttttaagtgtatttctgagacgtgtttagaaatagtggtgaagttctctaaaagatgttatttgtcattatttactggaaaacatttccataaattgaaacaaaagaaagaaaaaattcactcaatttaaccacgcaaagtgaatttccttccttttgtcatgcttagcccctgtccttttatagacatgatttttacatagactattttaaatcttacctggaagccaggtgtggtggtgcatgcctgtaattccagctactcaggggtataaggtgggagaatcacttgagcccagaagttcaaagccagcctgggcaacctagagagtccccatctcttaaaaaaagaaagaaagattaaaattttatgtagaatttttttaaaaaaatgatttaaaaacttaaataaaatgtttgtatcctgagattttaaatgtgtttgcacacaaatccatttctacttggtcttcgtaatacccatgatgatgttcccttactgctagatatttagattatctctaccttttcctgatatagatagttctgcagtgagcactaccattcctggagtttagttgcttcctttaattgtcttagaattaattcccaagagcaggattattaagtcaaacgattccaacattgtatcattcgttaactgtattacttactaagctgattgtgtagtggggtttcttaactaaaataggagcattataggtggcttgacagattaatgtctattgtttctgaaagttgaattccttggactagaaaggggaaggctttgggaaacatatccgttggatgagcaggctactgtacaagtttcggaaaatctctttaggaactcggaccgcagcacttcctgtctcagaagggtggattttgaggaacggatccctgtcttgacctggttatcaaatccctactcgtcttacttccctttccccaaatgctgggcttcccctgaagctgccaatgtaacttccattgaagtgaaggtgactgactcttaagagttgccaagaatcacttccaaaggggtggtggtgggggacaggcaggtcacagttagagggcctgctgctatgacttcctggggaagccttccacagggaatccagcaggaggttgctgacccacttgcacacctcaaagcaatggaaatacactaatgcacagaacttgactaaggccaaatgtcattgtcttaccgaactctgaaatgagcagctgtcatgaaaaacagcctttttttggggggtggggggcgcggaatcttgctctgttgcccaggctggagtgcagtggcacgatctcggctcactgcaacctctgcctcctgggctccagcaattctcctgcctcagcctcccaggtagctgggactataggcacgtgccaccatgcctgactcattttgtatttttagaggagatggggttttaccatgttggccaggctggtctcgaactcttgacctcaggtgatacgcccaccttggcctcccaaagtgctgggattacaggcgtgagccactgcacccggccgacaaacagccattttcttaaaacaatgacaacaacaaaacactcccaaacaaacaaaaataatacaccaaagttaatccaaatttgaactaaaccaatattgtacttggctttggtccctgaagaagacctcaatcctgttttccatctcacctttaccttgttgcatgacactggatgacttctaatttctgattttatttgaatatgtgtaaaacaatctcccttatccagtaatactcatttctttcagctttgtaatccctcccatcgatatacaaatggggtgatatttgattttagaattaaataactatagaataacagaattttagaactgcaagggctcaaccctgtcaagataaggaagatgacatggttatcatttattgaaactagccactgtgttagatgttttactggaattacctcatttaatcctcaccatgctccgcaagttgggtattatcattatcctcgtttttcagaagactaaaactgtgtgtagagaggcttgccaaggtctggcagtcagttggtggcaggtctgaggctagaagctcggttctgggcactctctccaccctgggtgctttcagtgtctggtgagtggctgtgtgtagaatggcaggcaaggctgtccatatccagaacctcctggagcctcctggaaggtcagagggctttagaaacaatctcagggcatcgctggatccgtaagttgcagtgttttcagagttcccttttctactctcctgtatctctgctctcccctctgcacgcacaccttcaaagtgcctacagcttttcaggcccagcaagaacaaggattgggcaagctgccaagcccaatgctcagaggaaaggaaagaaaacagagatgtgtttgaaccttccagctcagtgtgcctctgtttttcctttgacaggaaatcgatgattgtctggtccaagcaaaagaccgaagttacgatgcccttgtgcacttcgggaagcggggcttgaacgtggccgccacagcggctgtgatggctgcttccaaggtactgtgctggaagtaccacaactacatgagtctcagtccctctagtgtgccctgctcatcacctgtgcgaccacacagaacaggctaaggaccaatcagtggtttttcatcttttaggggtccttttgaaaatctgatggaaaaaaatgctgaatcttgccccagaaaattctcaccccccaacacacatgcccacatacttgcaatatcaagaggttcccagagcccctgaagctcatctgtgcgtcccaggttaagaatttctaacttatccaaccccactggaaacaagaaaataatagaatttctaacttacttggcacttaggcctgggagaaacagaagagggcaggggagagagggagagagtgcttctctgcagtttcctagggtgcactgggagagtcgcctaaatgcagtggacaggtggagagactacctgagcaagcgggtggactcactcacgatcatgtggcccagcagatccaggggaaggaacccaggtcctagaataagttgagtggtccagacatggaggtcagtaatgtgccaagccataacaactgaagtggaggaggtttgaaataaacaccagtctgtgggatgttgtggtgtgagcattacttctttctctattctctccagcccttttcaaaactgtgtttcttcctagcatcttctcatatcaccctcttgttgtcgtcaatttgtcattatttacgtagatctgaaaagttaaattggtcagatatttcctctcatgtgaaatcagcagatcatcctagtgttccccagggacaagcccttccccaacaaccatgtgtggagtagggacctacattcggctggtggtggagggaaggcagttatgctgatgattggaaagacacagtggttgggaggtgagttgtattagcataaggaagtttgtcccttgtggtgatgtgagggttttggggaaggaggcgatggggcttaaaaggtttgcaagaagatgattagtacagatcttggtgctctatgaacattgtgcggatggcaggatggagggtgctgagagccagtttcaagagactgagctgggttttccttgccctgaaccaaagagaagcacattaggatcatttctggaagagactcagcacactgggccgggtagttgcttgaaaagtacctttcaggaagccaaggaattctgcagacaaagcctggacaagagggaaggggaaccaaaaatgaatgattcctctttcagacaagaccagctccatctataacacagaattgtagctaggtatcccgccactccatgtggcagatctcggggttgggggtccagggggtctctgcccctttactataatagctgctggcaaaatgagggatcccagtgagtatctttggaagggaaattctgctttggtttcccaagatcaatcaggatttatgaacagcaataaattccaagaaccttctatttgagatgcaaccattttatgctttaatctttaagctgaaacaaaagagaactcagaattgctaaattctgaattcatcaggccaacctggcaacgtaaagctacggaaaccctgtctcagcctctctctaccccatctgttctgcctctgaagcctgaggaaaacaggctgctgctctttcctccattcattcctggagtataaacgtgctatatctgtcagggtggttcagtgtgcgtcacctggtggcacagctgcgtgcatgtagatttcattctgacaataacttctgcaggccatccttttctgggtctgcctcaagatggagcctccagagtcttcctatcatcctggccagtcactgcctgtcccctaaccacccgggaagcccgtgagcccgtcttctccatccaggcaccttatagcagctgaaacctaaaagaagcgccagacagtctgaaagttgcctcaggaaataactgctcattagttctttccagctggactaacgtagtgagggacatctgctttctgttgaatttggtttcagatgagaaaattttctgccttgtggggctttgctttttctctctaaatataaatatctggagagagaaaacacatattctcttctaaaaataatgccctctatttttgaaacagatgtgtacttaaaaaaaaaataaaagaagaagtaaaatccaaaaatccaatctagctgaggtgtacatcagtggtttccatagcaacagtggatcacttcaggccttggtcaaaggatgatgactcaccagtgggtccaaatctggcttgcatgcccaagccacctggagagctttgctttttattttttttttaatagattctcagatgtgctgaatcagaatctcaggcagtgggcccatgaatctctatttttaacaagttccccagatgatttttaaacagccagctctgtacaagtcactgcctgagaccccatacagaaccatagggggcacaggtgatgagggttaaagcagttaatttcagtaacattcctggaatgcagattcacctccttggaagccttaaccttgagaatgaggaaagcagtggcgtgtgtgtgggaaccgggcagcggggagggggaggccggtgtttatttctccaaaatttactgccagttgagaaatactatgatgggactacaaattctcccactttttttttttttgagatgtagtcttgctctgtcgcctaggctggagtatagtggtacaatctcagctcactgcaacctctgcctcccgggttcaagcaattctccctgcctcagcctcctgagtagctgggattataggcgcctgccaccatgcctgtctaatttttatatttttagtagagactgggttttgccatgttggccaggctagtcttgaactcctgacctcaggtgatccgcccgcctcagcctcccaaagtgctgggattacaggcatcccacctcttttgtagtgctcccaagagcctagcacagtgcctcgcacctggctgagcccttatcaatcttgttgattacccaaggggaataattagagcaactgtctgaaaaaaagacacgctgcaaagtcacccatagctggggtgactatataatttattgttcaaaccaggacacatttgagaatgtaaagcatgcttataataattactctgaaacaacaggtctaaactaggcctgtttggccagtcatggtggctcacacctataatcccagcactttgggaggccgaggtgggagaactgcttgagctcaggagttagagaccagcttgggtaacatagtgagaccctgtctctacaaaaaattaaaaattagccaggcatggtggcatgtgcctatagtcccagctacctgggaggcagaggcaggaggatcatcgcttgagcccgggaggtagaaactgcagtgaaccatgatcacgccactgcactctagcctaggtgacagagcaagaccttgtctcaataaataaataaataagtaaaataaaataaataaataaataaataaaataaactaggcctgtcccaaggaaaccaggatttatgatcaggtgactcctggcttcattttaaatttcttggacctgcctgtcttctcctcccacaaaacaccctcaacttacaaatcagttctcactctcagtatctactgcatttagtgaaagggatgcaagagagagtgttgcatggtgagaatactcttccttaggatcattcctggaagagactcagcacactgggctggaattacaggccaggatacagattagttctgacagattaaatggaggctgggataaaacgatgggatgaaagagtaattcctccttctgtcttcttttttccatacttcagtgactttctaggaggaaactatggagcttaaactgaagaatgaaaaatcttttgactacacttttagttaatcctttcaaaaataatgttgagccctgtgtcctttctctaataaaattaatgtttgcaggagtgttttttgtatcatcatgaattgtggaaaaaatttgtaaaccacattattatataaatagaagtcctggccaggcatggtggctcattcctataatcccaacactttgagaggtcgaggcaggcagatcacttgaagccaggagttcgagactagcctgggcaacatgatgaaaccccgtctctcctaaaaatacaaaaattagcctggtgtggtggcatgcacctgtaatcccagctactcggaaggctgaggcaggagaatcacttgaacccgggaggtggaggttgcagtgagccactgcactccagcctgggcggcagagtgagtgagactctgtctaaacaaacaaacaaaaaacaacaacaacaacaacaacaaaaggaagttcttattaatttttgtttatataaggtctttctatgttgcttaggctgaccttgtattccttggttcaagtgatcctcctacctcagcattccaagtagctgggattataggtgtgcaccaccatgcccagcttattaatgttaatattactgttttgtcttagaactggaagagctaaaacaaacaaaaaacatcaggcatgagaaatttcttccagggaatttaacccctatcccaccctcaatttcctacaaggctaacccctatccccgggaagtgttgatgcatctttctttgagtgaaaactgctgtgcgtccttcctgaggaaacacttctcaagaaccctctgtctcagcattcctagtctctgctggctctgctcctacatggtacctgtctcctaactggtaattccatccagagggaaaactgaaccccagatctttttaagactagaaatgaaaagtctctctcttaaaaaaaaaaataatgctctagaaatttatttgttaagcaaaacatattctcacatgaaaaataaaccataggctggccgtggtggctcacgcctgtaatcccagcactttgggaggccaagacgggcagatcacctgaggttgggtgtttgaaaccagcctgaccaacatggagaaaccctgtctccactgaaaatacaaaattagccgggcgtggtggtgcatgcctgtaatcctagctactcggaaggctgagacaggagaatctcttgaactcaggaggtggaggtcgcggtaagccgagatcacaccattgcacttcagcctgggcaacaagagtgaaactctgtcaaaaaaaaaaaagaaaaaagaaaaaaaaagaaagagagaaagaaaaagaaaccatagtgagacgaaccactgaacaaaaattttaaaaccatggggtctccaggctaccttacttcccttgcagtttgaaccacatactaggtttcttctgcctgctgaattctcagacctggtaaaccaacattcatttttcacttgtctcataactcgaaaaataatgttttagttcccccggagatcttgtctccagaacatttccagtagtaccaatactattactatagtccacctattgaagaaagctgctctaagtaaaaccagcattctgtgaattagggattcttctcttgcagtttgttttcagagttgtgtttgtgtgtatatggctccatcctcccccatccccaaatctggtattgtaagcttcttgagatgaggggctctggcttcttttcctttgtttcttgcttagaaaataaacaaaaacagaacaatgctttgttatttagtgctttgcactcatagctattcattaaaccttgttgattgatttgaagtatatacctttttgattcctctaaccctgccctgtctaatatggtatccacttgccacatgtagctgtttaaatttaaattaattaaaattgagtataccggctgggcacaatggctcatgcctgtaatcccagcactttgggaggccaaggcgggcggatcacgaggtcaggagatcgagaccatcctggctaacatggtgaaaccccgtctctactaaaaatacaaaaaattagccgggcgtggtggcgggcgcctgtagtcccagctactcgggaggctgaggcaggagaatggcgtgaaccagggaggcggagcttgcagtgagccaagatagcaccactgcactccagcctgggagacggagtgagactctgtctcaaaaaaaaaaaaaaaaaattgagtatatgttggggaccagcctcaacaccacccatagggtagctgaagtccggtggcgacaaaggaatgagaagagacaggttaagagttcctaaaggtgggagccagggggccagttgcaaaatggaggctgcaaaaggcccagagttctggtctccacactatttattgagtacaatcacttagatctaagaagcagatgttcagggcaaaacagtgaaaaggaggcagtgcgtcataggtgcaatctatagcagtagtggtttaaatgaatctcctttgtgctcaaacagcatatctttaacttatcggagagtagctagtgggagcgggcttaaccaggagcctgcacgtctgtccacattccagtgtttcaaaggagtgtccttctccttgaacacagtgtttacagataagagagcaggtctcgctctgagcatgggaacatgatggcagttaggaggctttcctccttagaggcctcttgtggctttccacaacttattgtcccatatttttgtggccagtttatacaggcaccccacaagcccttttcccaacagtatacctaaaattgaattcctcagttgtactagccccccaccccctttgtttttgagacggtgtctcactcttgcccaggctggagtgcagtggcacaatctcagctcactgcaacctctgcctcccaggttcaagcaattctccctgcctcagcctcccgagtagctgggattacaggtgcctgcccccacgcctggctagtttttgtattgtttagtagagacagggtttcgccatgttggccaggctggtcttgaactcctgacctcaggtgatctgcaggcctcagcctcccaaagtgctgggataacaggcatgagccaccgcacctggctgtactagccccatttcaagtcctcatttgccagtatggctgatagcacatttccattattgaagaaagttcttttggacagcactgccccaagccctttgttaaccctccagggttctcctttgcctgtttttcacccctttgcccacagttgctctggcttcaaaaggacacccacccctccttacctactcagctccttggggcctctgtatataaggttcaccaggagctggaaactcagcctatagcagcacccatgctgtagctcttatttcttcttcctctttactggtctggcccgctttcacaccatgacctctgctttcctgacttgctctctaaaactcaggcacttggcctgcaattatagtcagcggccaacaggcgatagccaagcgttggttatagcccttagcatctgaacagccaggcacaatccactgagagttatattattttgtttttctacttaaaaaaaattttcccactctttccttaaaaagaaaaagaagatctacaaaacagtcagcacaatagaaaaaaaaaagccctctcccacatatccttatcttttatccatcagtgctctatctaaatgtctggcttgaataaaatactgcttttaaatcaccatgaaactatttttggaatcaaaagctcatttgaggaagttcataagcccagtgatttggggtttctgacctgactggagtcagttgccttgcctttgttttgctttctagcaaaaaaaactacctgttaacaattagtcagagggcaggcattgattttctttttataaaacctccctgtgtcagctcatacttaggagatatttccaaggacggagaagagatgactgctgtcccctaaccagatctgtatgtttcacctctctggctttagtctctaccatctattgaatcaaagagggtaaggattccagaaagccctatgtttgtctcttcatccctcagaggagcatttcctggccactgtgctagctcacatcaagttagccttctttcttcattttttagccaaggactatgtgacatgaagttaatatttagaattcaccacggcaaccatttttaaacaccaagattatctaaactgtatggacaaactgctgaaaaagtttggaagtattccctaccctccagtctcccaaatattagtcaactcgtacccaagtttcactctcaaaatgtgtcgaagcagaaccaagcaagactttttaccagtgtgctggattccggctctcccagtgtttctacctggagtgttacctcacctcacactgctccatgcatagtgaagtggattcaaatgaatgaaacacccacatcacactcagctgaagaggaagggccaggaattcacacggagttggcggtccgacattacttacctgctctgttctgtggctacctgtggagattgtgcagcctgatgcctcaagggtccaagaggaaagagggaagcctgcctgcctgacctcacagggcctggtggaacctagaggtctgaggaaatatttgaggatcatgcgtgagtgggaagggctgtctcttggctgtggtgacatggcacctcctcgttctcctcttctctctgattcccctctcatgtttgcctcctccctcctttcctcacgcctcagtgttagatgaatttctctgggccccacctttctctcctctctctcctagcaccatctcatcctgtccctcaccttccgctgtcacctgatgacctggttcccagatgggcttctctgcccagggctcaatccaagtgttcctggttctctgctgaatatctcccttgtttccttcatactttagttgacagtcctgtaactccaaatctgcccttccgtgtgtcccaccattctgatgataatgaaattaccatcttgtcaggcacccaagctccaaatctctgtcacctttgatgccccaccttcctcccacttactcttcaagccctaaccatttgacatcccttctctgcatttgggccttcctccacacccttccttctagcttggactcttgcagtagctacccaaatggtcgactgctctctcccttcctgtttaagtcctgtacagtccgaccctgatcctagcctttcagtcttgtctctccttacctctctggctcttgtgataactgcattcacagaactgccttctgtactgttctggaaatagcaactctgagcgctgtttccagaattttctctttcttgcctctgcctttgctcatgttggtgcttcatctgcctctgtttctacctctttgaaatcctccccactcttccaggttaatgccatctcctccaggttaatgccgtctcctccatgaagcctcctctgatcccaggtagaactggcctctcactcctgggtcctctgcactaatgtcatcatgtatatgtgtcttacctgcatctccataggtgctcagtaaatgttaaaggaatgaaagactgttgtgcatatttttagctgccatgaccaacagagcaatacttagaatcaaggatatccaaagttgggctttggagataagcagaccaggtttaaaagtcccagctccctgcttactgctgcacctctgtgaacctcgcttcttcacctgcaaacagggatgatcatagtacctgccacaggagttatgaggcagtgtaaagacttcacagaatgcagagtttataataaatgtttaataaaggttgcctgttatttgctcatatgtcagtttgatctcaggctgattatgatcttctctttcctcactgttgaacagaataaaaaaaaaaaagtcaggccctggcattgggacgttatttacaaggcaggctcttctgcacaggaggctgacttgcctgccttgtcctggcccacctcgcatgtgctgtgtcttcctgcgcaagccacgctcccctgggctcagggttccccactgttctgggcctgacttttcataggggtgcttcttcttcctcttccaccctgaggtgtagcttatgacacatgagcacctgccacctgccaagacaggaggaaggtcaaacgtgggctgctggagcagctggaaccctcacttcagggaggaaaccaagcaggggtttgagtgacttgcccaaggtcatgcagctgttagttgttgagctgtgatcggcaccagggtctctagttcctccagtgtccttgcatcactccaagcactccccaccccaacacatacaccctaaactgacacttcctggctgttttgtgcttggattacactaccaggccctggtggctgagtacctggactgtccctcactgaggattttagagtctctcacaccccagggtactgctcttctgatgatcgatcagctctctcttggccttgtggtgaggctgggaaacacttaatgcagggtgaaagaatgaggatcacaagtacctgtcaccgtaagtcacagtttctgtaaagctcgatcacgtgcgatagcgtgggcatgtttgcacaccagtataattagagctcactttgcaccagcggctgggcagatttgtcctgtgggtcccccttcccacccttagtccttcctgccttctcattgtccctttccagcagggcctttgcctctgaaggaggaagtatagatgaggcaaagcttccagctgagacttccacaggcaaggccaggggcagctgctgtatgtggagggtccctcctggtggccctgactccccatcaccgggcaagggcctggctcagatggccgggcttggtctggctacagagacccaactcacctgagcactgtcattggtcagcacaggcctgtctaacctcccaggcttccactcctcacctcccatccagcctgctctgaaccagaagcaccaagcccacctccctcaccagttaatgcttgttcttgcctgctgtctctccttaagggcacttcccagaaaggagactagaaaataccgtctgtattccagataaccacgtgcctgctgcaaagtgagagaaatggggagaacagatactgggtgcaagttcttggtatgtgccacgtggcatatctaggatgttctcatcattcaacatcctgcctccttcacactgctcacctctcaaaaaccttcagtggagtgctcagtttattgtcaaaaaccaagtttaggcagctgaagcccagttctcccaggctggtctccttttactcactggcaccaaagcctcttctccccaggtgggttcactcaccgtttcccaggtgcaccttgggttttcgtccactctcacgccctggcccaaagcacttccccgccagcacgtgccttcccccgcccgcttcagaggatgcagccctcacctcactcctcactcgggttcgaccccttgtgtgagaggatgaggcctctgcacgtgctcagccacggtgacggtgccatcccctgccctgtactctggcatgatgttggtcatctttgtcacttgtggcctggcatgcacttttgtgtcttgatgccccaactagactgtgagctccatgggagcagggaccgtaccatcctcgtctttgttcctctgcggtgcttcacgcagagcttcgtgaacactccagcagcatctgttgcaagtgagtgaataaatgggtgagcgagcgagggagtgatgggaggaaagaggtgaggacatggctcccttcaactccattttattgccttggtgcccatggcttttttctccttttcccctttatcaggtggctcgactctttcattttatcttctctttggacctgagagaagggcaggtaaccctgttgagaggtgtgactaactccaaactgatccagttgggcagcgaggccaggccaccggctctgctcaccagcacgtggtctggatcagaggcaggtgtcccccctgcctcggcacctgcgtgtgcatgtgtgttaatccatgtggggcacacggagccaggccccacttcatcgtctttccagagactcttatggtgtgaatttggtagcatctaacatgtgattaacttacttgggttttttcttttctttgtttaatgcctggagaatggattgaatttgatgatggatgctattgcagtagaaattctccttctctgtttggtttgttaatcccattttgtgtcacagacaagggcctggtcctcatgcagcatgtcattgggagcctgcttggcttggatgtggcgcatgtatggctgtggaggctcactccaccagtgaggcgggcaccccatggggtttggaaggaagtactaactccttctgaattactggtgggaaatgcggttgtgctggtggctttgttatcaatttcctgactcactaaaaccctttgtctttattgttgttgtcctcagtagcaggcattagatattgtgtcaagtgagatgggctaaacttcgtgctttgctggagccttcccctgtgacttggtgtgtccctctggaaaagaggacctcattaagggctcaacactcattcggtttctggagataccatgtgctccttcttagttctgtgttgctgttattgctgttttaattactcctatgtctttttttttttttttttttttttttggtctagatggcattggtcagcatcatgcacactgtatattcacaaaatgaggtcctcagggtgaccttgagtgagtgctgtgggtgttactgaaaattaaattgtactgattttttaaaggtaatgcatgttcttggtgcagaattataaaaggacaaaagagagtgtccagtgaagagtaagtcttactcttacccctgccttctactggcatggttgtttacgaagaaaccacgtagcctttctgcaggcatttccgctattcagatacatccctggccatgaacaaggtataagtggacccccatccccttagcacacaaaactacaaagacctcacttggggtggattgaagtggccgctctcagtggtgacaaatactaacacacattccttctttttctacctggtttctatcttcacctacccaagtcctccacccacccaagttcaagcgcagtctcctctgggatgccttgcctctctgatgtgtgccttctgccctgtgcacccacagccctctgacacttcttatacgctccttgcagacacatctcaaggcttgttcagcaggatcctctttcaggtctgggaccctggctgatgcatcaggctgaggtggggatttcccactgtcacgcttcacccaggcggcagctccataaatggtcatacgttcattcatgcaactccttaaccccaaatatgtatcaagtagagtggcagatgccaaggctgcaatagtgaataaaacagacaatagcaatatttaaatatcattgtgtggagtacaagagagaagtacagctcaaaggctgtagtgacagcatttacagggaactgggatgagtagagaaagctgctctgagaagtgcaaccatatttcattgaatctaaaaagctgtggtttctgagacacatcattatcttatgttccactaagaaagataatattgccaattaaattaggacacaatgttttttcacttagaatgtttatttatttatttattattactatttttgagacagagttttgctcttgttgtccaggctggagtgcaatggcacgatctcggctcacctcaacctctgcctcccgggttcaagcgattctcctgcctcagcctccagagtagctgggattataggcatgcaccaccatgcctggctaattttgtatttttagtagagatggagtttctccatgttggacaggctggtctcaaactcccgacctcaggtgatccactcaccttggccttccaaagtgctgggattacaggcatgagccactgcgcccagccagaatgtttatttcttcttatcaaaaagactcttagacatcttttttttgtcacttttataaatacattaaaaggaacacagctgggcacggtggctcacacctgttccagcactttgggagaccaaggtgggtggatcacctgaggtcaggagttcgagaccagcctgaccaataaggtgaaaccccgtctctactaaaaatacaaaaattagccgggcgtggtggtggccacctgtgatcccagctactcaggagtctgagacagaagaatcttttgaacctgggaggcagaggttgcagtgagccaagattgtgccattgcactccagcctggctgacaagagtgaaactccatctcaaacaaacaacaacaacaacagaaaaaacaaaaagagagaaagaaaataaaaaggaacgcattagcacaataagtggttaagatctctctaacctcactttttcactttcagagtctcccgaatcacttttcagctcggcgtgtcagtatccacttatgaccatgccatatcattctctgttccttctagtgtgttgggtgatgtcgagctgttgtttctgggattttcattcatgccagttttgatgctgccactttcttgatcataccagaaagtgtcagtgagatatgtgttagacaactgagattcatattcctttctcaaacagttcttaaatggtttgttaattaaacactcaggggcttcagttgtccagttatgccagggagaataacaaccaagtatatctatgtgtaggcgttgacaatgatgtcagggcggcagcaattgtaagacccaccccaatttcagagatgaaaaatacgtcttaaaattgatgaaaatctgctgggcgcggtggctcacgcctgtaatcccagcactttgggaggccaaggcgggcggattacgaggtcaggagatcgagaccatcctggctaacacggtgaaaccccgtctctactaaaaatacaaaaaattagccaggcgtggtggcgggcacctgttgtcccagctactctggaggttgaggcaagagaatgcgtgaacgcgggaggcggagttgcagtgagccgagattgcaccactgcactccagcctgggcgacagagtgagactccatctcgaaaaaaaaaaaaaaattgatgaaaatcattttcaagaagtctaggagtaggtgggtgttgtcattattattctggtgacttagcgatgtctttttaaattttaaaaatagaaacgggatctacctatgttgcccgggctggtcttgaactcctgggctccagaaatcctcccccctcatcctccaaagtgctgggattgcaggcatgcaccaccagatgggccttctcagagcttttagtatgataatgtggctcatggaattatggggaatatggtattaatgctttccaaatttagagaatccaaatttatttccccaaagtagggaaaccaattttgcagaataccaatgaacaactcgtggttcttcccagaagacaatggtctagaataacaaagattctgcagagcggagctgaacagacagtgtggaatggggtttgtggaaagtgaataggaatgagattttgtgtagagactgagaagggctgaaaggtttacaaaagagagaggcatgttgattttttttttttttgagatgaagtttttgctcttgttgcccaggctggagtgcaatggcatgatcttggctcactgcaacctccacctcccgggttcaaaagattctcctgcctcagcctcccaagtagctgagattacaggcgtgcaccaccacgcctggctaattttatatttttagtagagatggggtttcaccatgttggtcagcctggtctcaaactcctgacctcaagtgatccacctgcctcggcctcccaaagtgctgggattacaggcgtgaaccaccgcgcccggtcaggcatactgattttaaccatctcagagtgttttgatgggcaagggctaatttgttttcaggagtcttgtatctatgccactataatttcctctgacacaggcctaggttgatactgagctattattatctccctctctttcctaacctctgccactgccagtgtgatattggagctagactggctggcttctgggagttgaatggagcactttgctaaaatgaacgtgtacgatgcctgctgttgctttctctcacatatgttgctgagcgacaatgagcaagaactggcaaactgtgttgagggaattcgtccctggccgtttatttgggcttggggtcatgaagcttaggaagtgaccttttccacctctgctttcaatagcaacctttgtgtcttaggcagctttcaatagctttcaatagcaacctttgtatcttaggcagtagccacagcatcaacatcattatcatcatagttgacatttttgaagactaaatatgcaatgggctatgtgatgggtatcttaaggatgtaatctcattgaatccgcacgagcagccggccatttggatcctcttctgcaaatgaaggtcttgaggtggagagaggttaagatcactcagctgttgaatgacagggctggaatttgaatcaaggcctgactcaagaactgctgttctcaatcttcactttctgtagcttctgctaggatacttctgtgttgtatctgtacatttgtcgttctccgctttctcagaaatcaaactgtatttttggtgtttcatgttagcacctagcaccatgttcttgcccataaaaagtacttggtaattgttgaacaagtaaagtaaacgaagaaatgagaggatgaatgaaagagtgagtcagtgaacagtttgcttgaacactaacctaacattgagttactcacttataattagcagaatattttctcactcatttcagaatcaagttttgttccttagtcatcaaatttcttctaaattctagatgctgcctagaatgtttctgcgtaaaataatcatggatcattggctgctatatttgaaggggttatataatgggtgtctggctggtccagcctccattttgctggcagagaccacccagctgttcctgccaaggacgtgagaccttggacccttgcccaaccatcactctagagcagtgtctgaggcaaccagggtgatttctgtcttttttcatataatatcctccaaatacttcttggcctggacttacaattctttttaaatagttttctttgtgttattgttgttggtttcctggtgacatggtttttatatctttggtaggttgggaacagatctagttcatattttagtgcatcttgcttttagtctggcacttctttctttctttttatttttttgagacagggcctcactctgttgcccagactagagtgcagtggtatgatcccggctcactgcaggctctacctcttgggctcaggcggtcctcccacctcagtgtcccgagtagccggaactacagacatataccaccatgcccagctagtttttaaaattttttgtagatacagggtctcgcttgttgcccaggctggtctcgaactcctggactcaagcaatcctcctgcctcagcctcccaaagtactgggattacaggcatgagccaccacgcctgccctcttctggcgtttcttctaaacctgactgcaagcccctttttttccccctcccctctaatgaactcattttgcgtctgctccttgatcctatctggatttttcacttcagcgaattgctgtgctttgttggttcattttcattattttttatattaagtaaaatgaaaaaaatcttccaaacccttctctcacccctgaaaacctcttactcaactgttttggcccttgcttatttcatcaatcccaccagcagccctcttgtcagcggcttgaattgattttgtgctgatttgttggttctgttatgtctgttgtgcagtattgtccccctgtcccccagatctctgggaccactctttccttcattatccaagtggcatagaaaacctctcccatgccactgcagtgccatgcacccgagggaaccctgcacaccctccaggctttcttctttctgaagatgtctgagttcattcatttgcctggtagttacttgcctgtcacttcttgctccaaatcctagccgattctcaatttccccagtctcctcccactctcaggtttccataacctctctctgcagcccctgaggcacacttaaagcaatgccaccatccctgagccttcactgtgatcattttcactctgacacattctctcatccagacagtgaggagctgctctttcgtaagtaaaatggattgatcttgctttctaaataaaagaacaattccccccgagattaattctctgtctccctcagaatatgaaatggttacaatcagcagggtttttttaaatcatttttttcctttctgattcattaccttttgggtattttatgaagctgaaatgcaccagcagaagtaaatgtgcctcgtagacagtaatatgctatacaaataaaagaaatttctgttgtcaaacatttagaaaaatattgtctgtattttgtgtcctttgaaaataataagaaccaagcacatagaatattaggttttgattgcctgaccagattctcatgtactgagaaaaatggagatacatgtggatttttatttatgcaaagcaagagaagcagcaggtggcctggaaggagtaggagctgcaggcagtagtcacgcccttggccctgggtctgtctgaggctccggatcatcatcgtatcatcgtatcatcatagtggtgtctgagggtagggagggatcctggagccaaaggagcaattactgagccccagaggaggccctggaaaattccgggatttgaccctctctgtgtttccagcagctatgtctgggcacctgcgcctcagagttgatccaggtcttgatttccacctggctgaccatcagagctccctcttggcctttgtcgagtgtgacctgtggagcaggacctctgacgtgtgcccctcctgtgttgtatccagggacagggtgccttatcggagagactgcggagcttcagcatgcaggacctcaccaccatcaggggagacggcgcccctgctccctcgggccccccaccaccggggtctgggcgggccagcggcaaacacggccagcctaagatgtccaggagtgcttctgagagcgctagcagctcaggtaggtgtcactttacttcccctctttcccactccttgggcctcgctttcattgagagaggcccagtccgcagtgtggcatgcagcctggccctggccccacggacctgccaccaacggggtgtccatcagatcatgccaggtcagccaaggggcggagcacccctcaggcccggccaggaaaccagcctggtgactgatcagggacagggctaggtcacctgcaccaaagggtcccctttcctccatatgattgtctggggaattgggggtagttgggggctagtgtctaggcaaagcctggaggcagcaggcacaactggacctgggccccgggagccttctgtgttgtcttctcagactccggggaggcatacctgttgatacctaagtgttgtcttctcacccggggcttactgctctcacgggccctcttccctgcctgaatattgcctgtcctctctctcactctgctgtctccttctcatctctgacctctcatgtacctcacaccacccccagcctctgcataccaagggccatgctagctctgagttcttgttcctgtggtgaccaggaccttacagtaaccacacctctgcctccaatgtctgactctggtgtcacacgcccatcgtgggattgctggtattgggactgacctggggacctcgttaaacatgcaaagtcctgggcccatccgcagaggcttcagtaggtctggggtgagacccagaagtgtgattttcattgagatgcagccgtgtttgggaccccccgacatcggatccaccagcacgggtttcaggctcatggagggtgggggcacacagtttcccaggctgctccttgggaggatgccaggggccttgggtctcaggggctgagcacagcagctgcccaggactgatggtgggggggtgggggacggttctggatcaccacttctgcctcgctgtggtgagaagggtgggaatctatgtccacaatgtctgtctggtgactgcgtggcccttaaatctataaacagagatgtctggccacctgtgactatgcagcctgcaggggacaccttggccataagccccatgtcctgacagaccccatctgatgcccgggggtcttagccatcaacaggaaggcatgaggcctgcggctgcctgggaatggcaactcatgctcagagccaagtgcagctcagggctccgtccatttcctccctctcagcagtgtccccttggcccttcgcaggtcttaagactgtggcttttctgttgggagatgttttaaccctgtcactgctggaagcagggcagggttggggaggtggaggctcggctgtgggggtgatggccacctcagggaggggttaccccccgagggacccccccccaggaatggaatcccaaaaggccagacaggaaatgacctcagggatctttcagtcaaacccagtgattttactggtgaagagacagaggtccagagaaggggactgtgcagggtcacccatgctgggctgcagtagagcgtggccttctgactccggggccagtgcccatggtcactcactcatcaaccatccaggctttgtcaagcatctacagcttctgatctgccggacactgccccagaaatagggatacaaaacagagttaagtctcatctccacactgcatcagctcatcatctaccaagcctcagatgaaagctgccccttagatggaaaaggggcctcaattcagtaaaacccagagggcagagagcaagaaccagtggggtgaagttcgaagggggtagccacttgctcgccgcatgacccgggcgagctatttaccatctctgcaccctagatttcttatctacacaaggaatgacacccctttgtagagttgttgtgaggcttcaaatgaaaccagccatgtgaaagtgcttatggccatgcctggcgccagtgcatagtagctgttatcattgttctttttgtaatttgtctctcctgagaaggcgcattgtcatgctgcaagtgtccaggagcaaaatgggccatcttgggaggtagtgaggtccctgacattggaaggacacaagccaaagctggatggtcaggttcgagggagggattcctgctttggctaggaagcgggcttaggtggccctggcgtccctttgcctctaagagtctgtgttgccattttagaggtgagcccagtggaggaagcaggctcagagaggttgtgcactgggctgaggcccccaggcccagaatccaggcctcctgcctagacctcccctggtgaattattcagggcagcctcagaactgggaatgcaagaagctggcagggtctgcagggagatggcagtgtcttctgggcctggagtatcttcccagcccagcatcaggtagaaaagcatttgggatgatttgctttggcactggctctgccactctccatgagcagaggtgatgacgtcccctgccatgccccagggaggcagtggggagtgttctggctgtcccaggctgagaggaccagctgtgctgcattatgccccagccctcctcactgctggcccccttggcctccgcacctatgaccacagggggcaaagaggaaaggtgcaacccagcagggaggccaaggacagtgtagtgctctttccagctgttctggagcctaaaataaaagccatctcaaaaaggaagacaggagctgggtgtagtggttcacgcctgtaatcccagcactttgggaggctgaggagggtggatcaccagaggtcgggagttcaagaccagcctgaccaacatggagaaaccccgtctctactaaaaacacaaaattagccaggcgtggtggtgcatgcctgtaatcccagctactcatggagtagctgaggcaggagaatcgcttgaatcggggaggcggaggttgcagtgagatgagattgcaccattgcactccagtctgggcaacaagagtgaaactccatctttaaaaaaaaaaaaaaaaaaaaaaaaaaaggaagacaggtgaaagatggcctggggcgtggatatggggcagaatttcctgggtcagaggctcttgggctatcataccctgaagtaaggtcaacatgcctaggaggaagtctggcagaggaagccaatttataccgggctggtgtactctccccagctcagcccccagtgtgggcctcagatgccaggccagatcaggtagcagaaagggccccagaaaaggggaagaggctagacttcatcctggctgggtgatgccgggcctgtgcagacacagcaaatgcagcacagcaaggcatgctccttcctcctgagcctcaattcagcctcagaacttctctcagaacaacccaggcagtcgctaccatagatttggccttggcacagaggacagacctgattccctcaggctttcttctttgtaaaaaagaccgaatagtccctattcagcctatgtcttagggttgtgaggagagcaaaccagagaatttgcaaaccctggacaggtggcaggggttgaagacaacctggagagaggtgggagctgcacctcgtggaattctctgcagctgctggaagcaacagattaagggtgcacacagtggaacttgaaagcatgatgccaggtgaagaaaagtgcaaaacagaatgagattttatctaacaatttatgtaaaaaatatatgcctatcatgcaaagtaacaatacggagtttatatgaagaacatgttcaaacaaaaagttgcacattaaaatattaaaagtgacactccttgaggaggaaggagaatgtgagtggggtgtgggaataaaagtcatgtaaaggcacataaaaagggttgccaggcgcggtgactcacgcctgtaatcccagcactttgggaggccaaggcgggtggatcacctgaggtagagagtttgagaccagcctgaccaacacagagaaaccctgtctctactaaaaatacaaaattagctgggcgtgaaggcgggtgcctgtaatcccagctactcgggaggctgaggctggagaattgcttgaacccgggaggcagaggttgcggtgagctgagatcatgccattgcactccagcctgggcaacaagagtgaaactctgtctcattaaaaaaaaaaaaaaaagtgaaggggatcccatgaaccagtgtggaccatttgctgtgagccaagaagggacatccatgtgacctcctgcatcttgagaaaagggaggaagatgcacacaaacgaggaagggaggaaggggcacaaagactgtccctgcacggtcactcagcgctgcaagctcctggcaggcagacaagggttctgtgcttccctctgtaaatgcctacccaacatactcaccacatgcctggcacacagagacctctgtatgtgcagtgaggacacagggtctaggcgttggagaaggggaaggagagttctttcctgttgctttcagcacccaggatggggctgggcagtgtacttggcctgaccctctctcttgcctggagttttcctctttgcttaaagggtcagggcaggcagggactgacatggccctccctgcagaatgagctggaaggtgtgtagtcagataccatatgctgaatgcctagcactggacaccaggaagtgtacaagaaatgttgaaagaatgatcctggccttccatggacttggagtcactcagtgagcatgtatttagtgagcacctactctattgccaaggcccagatgtgcaccaagaccaatggcgtgtacaaggcagcagccagttaggcctttgcaaatgcccagatgcgaagcactttggggttcagaggtaagtctggggaggtttcctggaggacattctgaactggaaagcaaagagaggaggaggctttgggcaggggtgcttggagttattttccagagggaactttgactctgtctccggccttccctagggctgcagggtgcaaggactgactttgtgtgccaggtgagggtatcttctgcacctgagcagaaactgaatctgagatgactctttccccactttggtgtctctacagagacccaccttcctgggatccctatattgtacacactgggatccccacacctctccagggcctccctgtttgcccggggctggttcctgtccagtgggggatgtcactgatggtgcccctaccccattcccacagtgtgtacctgctgctccacctgcaggacctggaaaggtgagtaagcagccagcctctccgcagcgtgctggactctcactcggaaagagcttctaaccaggagtgggcacctgaccctggggctccctttcagctgcatggtcatagggaggggtcaggaggttaaccctttataacagcaaacacagtagcttacagttcctgtgggctagaaatctgggagcagcttaactgggtggttctagctcagggtctctcaagaggctgcagtcaagatgtcagcctgggctgagttatcggagggcttgacgaaactggagggtccactttcaagatggcactcttatggctgttggctgggcctctccaaggctgcttaagagtccttacaacgtggcaggtggcctggcctagagtgagccattcaagagatagagggcaggcaggaagccagggtaccttttctgtcctaggttttgaagtcacactcatcacttctgccttattctatttgttggaagcaagtcattaagcacagcccacattcaaggggaggagaattaatctccacctcttgaagggaggagtatcaaagaatgtgtggagatatcttaaaaccaccacagggtcactgggcggggtggctcatgcctgtaatcccagaactttgggaggcagaagtgggaggatttcttgagcccaggagttcgagaccaacctgggcaatatagcaagaattaatctctacaattaaaaaaaaaaaaaagccaggtgtgctggtgtgcacctgtagtcccaactacttgagaggctgaggcaggagaattgcttgagcctgggaaatcaaggttgcagtgagccatgatcgtgccattgcactcaagctgggtgacagagcaagaccctgtctcaaaaaaaaaaaaaaaaaaagaaaagaaaaagccacaacagggtcatacttccttgtgctccaggtaaggacacaggaacttcagaggactaaggtcctctgaaatgatgaagtcctgaagttccaggggtttctggtcctggggcagccaagggagccctgttcctgctttgccacttacttgctgtgcaactttgcgtgaatcacctaaccgctgtgagcttcagttcctcctcttaaaacggagatgagatccctgcttcccggcctcactgtgctgttgtgaaagtggctgtgaaagggccataataatcctgggaaggatgatgaggatgatgatgatgatgatggtggtggtggtggtggtgatgatggtggtggtggtggtggtggtggtggtggtggtggtggtgatagcctggagcatccaggagaccccagggagagtggaggtctcccggttctggacagagactcctgttgctgccctcccagcgtgtgagtgatggcttgttggagccacagccacctggtggttgccatgacctgcttctccagttgcctaaccttaagtagacacattagggactagtgagggtcctggactaatccagtgcccctttcacactgcctggctccccatagagaagctgccttaggcttggaaggcaagaggggccgtgcctggcctgcagcctgctggctggtgtcaggggaggaaggaaggcacgcaaggtgcctaatatagcttttgctccagccctggtgccgcggaggcatgacatgcccctcccacatcggcagtgagcaagacaggaaactgcattatgtgacgtgtcctgttttccctgcattgctttatttttaaggctctcagtgctcagctttttaagtcctttatagaagagctggggattaggacaggcgcagtggctcacacctgtaatcccagcactttgggagaccgaggcaggcagatcacttgaggtcgggagttcgagaccagcctgacgaacatggagaaaccccatctctactaaaaatataaaattagccgggtgaggtggcacatgcctgtaatcccagctactcgagaggctgaggcaggacaatcgcttgaatccgggaggcagaggttgcggtgagccgatatcatgccattgcactccagcctgggcaacaagagtgaaactccatctaaaaaaacaaaaaagctggggattctggaggccataaggccaaactgaactgacagaggagtctgagcagggctgcagatggagagaagcgtcccagcccagctctgactaaccctgtgtccctgtggggcctcctggtccaagttggaaatgaaggggctgcgttcagctgtttccagcaccgggcactagacgctggcctggtggacacactagttcatgggaaatgaccctgtggtgccagtggctccaggcaattgcagggatttctgtctattcacactgtagttttgagtctgcaaattctgtgagccattccaaaagcctctaattctgggagattggcacttgggggtcggggagagtggctgccctgtcctccattcttcccctgacactgctctgtgctgctctcagaagcccttccctgccatgacatctggtggtttcatgatcagacacagtgtttccagtgcatttcaatagagctgtggttgattgtaggaactgaatagttctggaaggctgcatgtgcataagagtgtgtccaggattcagtgtccaagttctggttccttatccccgagcaggttggttgctgctgggatgggggttgctggacagcgggaagcaggtgaggcctggtggtggcctcaagacctggaagccgttgtcctagcccttcctttcttggacctccgcctctccaagggcctcttaatacctgtgccctggctctcaggtctgcatgcaaggaaccctttgatgattggcctacaccattccctctgaggccttgggaaagcccctgcactctgcaggcctcagtctccccctccatgaggtgtcccttggtcctcccagctctgacagtctctactggattgtgcagtggtggcagatggtgttgggggaggtctgtcttgcacctggggctataggctgactcttaagcagtaagaggatttcacagttgtcggggacactttcctcctggtcccctgaaatgttgtcacaaggggtgctcactcaggccaaagcctgggaagattcaaattacctctggggccatgcagagccccaggatccctcagcagacaggaacattttctaggagttgtaaattcaggtcttaattcatgatgggggtagggaaaggaggcatttcggaggctgctaagtgccttttagggcagtgacagagcttagaggccccaggggcagcagcctctattctaagctgcacatctcagatgccagaacattcttttcccatctttgctctgttcctgccccatttgtcaactgattccctattgttttctgcatgtctttgtctctctttttctgtgtgtctattattatctctctctctctttttttttttctctgcctacctctatgtcatatagaactgaactctggattactgcctgtgtggttagtcatagaggtgtccctcccccccttttaaaatcaagcatgtaggacataatttttaaaagcagtcatcctttttgtcctctcagagagagagagagagagagagagagaattgcattttgagtgtggcctctgggcagtgtccttctgattatagcaggaggagctgcctgaggtttagagcatgggaagtgagtgagcatgtgtgtgtctacatgtgtgtatgtgagtgtgtctgtgtgtgagtgtgtgtggatggggatgtgtgcatggtgcacacgtgtgagttttagtgccaaagacccttctctaacggaatgttcttttctctctcctcggtgctgttggggacgtggatgtaagtgttccagacaggcgtgctcttctgcagacatttgctgccttccattaatgctcccgctaatgtgtgctgtgtgggatgtttttgctaacctgggggaggttctgctgcactgcaggggtgcggcagccctgggcccactgcaggctacacaggcctttaaagggctgagaggctctgccagtttctccctccctcccttccccacagagagaagaggtggagcctgcagccctggctgctgtagccctgctgacacatttgctaatacagaaacatcagccaaggccacacacccattcccctgctgtggaagacggcagaaaccctgccctttcctagaagcaacccagctttgggcatcatagtggcagctctgcaggctcaaggccgtggccaccatcacctgaggtttgcaagttgttatggccatgaccttgggcgggagaccctcctcccacacacattgtctctgggagccaattagagtactaagatgtggatagcaatactctttcaggcctgttgccaggggtaaggacctgttgggtcaccaatctttagatcttcagggacaagaacatggaggaggcagagcatgggattttctacccagctactcactctcctgctcctcctggtgcccctcttttgggactatgttctgtggggttcatttctccatttatactccttcctgatataaaaaggagttaggtctacttgtggaaatatatctaaagtagcaaatcaaagtaagaaaattgaagcatggggagaagggagtgggcaagtaagatggaatcagtggggagaaggacattttaaatgcataccatcaaggtgtagactgttgagacacctggcttccttgaaaccactgcaaagagggaaatacaattattaagagattcagtccactgtgcaacagccagctagaggcgtggaagcttgtcttatttagaatgtttattctcactggttctgagagtaaggcaaatattatagacaacactcttggcagaaatgctcagcggacacagtgactaggagatgtcttatcttcttaggaggttctctctgtagcttcttcctgaggctattctggctccctcactgcccacactggcctcttttgctcccagcctctgctgagctgagcacttgtttctattcctgcttggatatctgggttgtccttgaaccatcactcctactgggctggagggtcatttcttttctaccctgcaatccttgcagtggagaacatgcacaaagccattttggtttcagtcctgagattatagtgatgatggtgattttggtaagtgtgagttcattgctcagcctcagtgaatccagactggataactagcctgggttgttagatgcctgaggatctcacggtgactttgggccaccttctgacacccacaaccatcagtacagggaaagccctggacctggatgtggagggtacagcatatgcagaggcacagtctcgaaccggtacccaccccacttccatgtcatggagttggctgctggggtggagctggccaggctgcttctgcagtttttgccttggtctgagggcttttggtcttttttccctcctgccaggcaggaggtatctgtgtccagaaggaatttcctggtttggttaatgggggtgtcaagctctgacttgggactagagctgagctctctgagatgacttcaggattctatttagtttagttgatgagtggccactgtgtgcccagccctgggtcaggtgctcagagagactgagggaggatcagccatggccccccagtctcaggatgccttctgttggctgaggcaatgagactgacatgaggaccagggcacccaacacaagctgtgtggcacagcctccaagcactgtcgggtctcagagtggggaggccagggagggtcagagtattcagcgagggctccctggagtcactggtctttgtgctcaacaggatgcagctgattaggacagaggaagggagcagaggacaaactaagcccagagtaaataagctgagggaagtgcagagtagaaataaaataataatagtaatttaaaaatcaaaggaacatcagtgatctcaggactttacttactaaggcccagtctgaaccaatcacaccccagcctaaaattcagctttgcatgttgtgctgcttcctgctggctgttggggagcacagcagtggtaactggtaaagctgcccaagattagggttcagttgtctgtttttttactccacgcctggtggtggtatagtctagcaagtccactgttgatggagagagagcacattcggtggctgaatatgttcttaggagcagggtgtctcaagaagagctgtggtttctatctggaggcctcacggtgattggaccagatgacttgagaaccccttagtcttgcattctgtgattctaggtaaaaacaatagatgcagcatagaaaaatgtgtgtgtgtgataccagataagctgggtaggggcagaagatattttacatctcaactaagaaccgcctagcagatgacatggaatatgtattagcatttaacatttaaaaaatactgtgcgttcaatgagatgaattaattctgaagcttttcccgcagatgtattcaaggcagactgaaacaggaatcttgctatcattttttttggcagaggcatctgtcagattctccttccttaggtttctctgcttctctaggactgggccttcgcaaaaaaaaaaacaaacaaaaaaactatatagctttgtttaaggttatcacttaaggcctcctggcattttatatcctgtctcttacaggatgcttggaattgaatatgcaagtataatatacaatgtcaacatggcttgtatgtacaacatagaaactgctctcccaccccaccccacatcactgctgccatcctctctagaggagattctttccctgagcattcacctggtgtgggatcacaggactgagctgcagggattgatgtgtctcagttaaagccgcttctttcttcacccagggaagtgatgcccccttagtaaatctactgaattactcagaattcagtagattctgagtctgtggttgtttctgtgcacagtgcctggagattcacacaactgcactttcacaatcccagatcccctgtaaggaggcccccaaaacatcagtgcttcctcagaccgaggggcctcagctgtcctcacaggcctggtttgctgtgctgtgtgcctaaccttgcccttccctgctccctgcactgatgcttccttgctataccttgtctcatctgtgtagattgtaaatggacattaagtggttgagggagatgtgaatgagggtggtatgaaggcatgggagccccaccaggtccaaaacccattggcgttttctgacgacgaggaggaagacctgctggatttcatgtacaagtataaagcacctcgaaggatggaattgcccctggaggtacacagtgtctggggctgtgggttggagtgtgtttgtccaaaggctatgccctggagattgggggtcctgggagcagcatctcttggggcaccaacatctcctcaatacctggggtggaaagatctccttccatcaaacaagcagaaccagtcactggatagcatccagctacttgccaaggagaggaaatcctattaatttcatttagaaataggagcgtgagccgggtgcagtggcttatgcctgtaatcccagcactttgggaggccgaggcaggtggatcacctgaggtcaggagttcgagaccagcctggccaacatggcaaaaccccttatctactgaaaatacaaaaattagccgggtgtagtggcgcgcacctgtagtcccagctgcttgggaaactgaggcaggagactcgcttgaacccaggaggaggaggttgcagtgagactgcactgctgcactccagccgggatgacacagcgagactccttctcaaaaaaaaaaaaaaaaagaaaagaaaaacaaataggagagtggtaaagtatctaggtctttattgttttgttttggtttttccaggtattaacaactaccactctaagttgacgtacaagtgaaaaacaacccaaattgactgttttgggggaagaaaactcagaatgtgttatttgaaaagtttttataaataagaacaaggcttgttcatcgctgtatctccaagacacagcatatagtgcctggtataaagtagctattcatgaaatgttagtgaaggggtatagccctttagggttaccaaaaccaatacccttgacatatatgctattttcagttgtaggatgtggatggagttctggcagcaggagggctgagcctggagcctcctgggccttgctctgtgatgtgggtagggagtcaccagtcatgagcacaggtgcagggaccccagtctttctctctgcttcctaaggtctcctctcctattccccatctgctgagtatcacggcctgagaggccatctgaagcaaataggaagtctccgtacagacccttgtgagacttatatggggagatgccttgaaatgttcccttctgcagacactgagcagcctagcattcttatttgttaggactgtaattatgaccacctccatgtgcagttcatcaggttcctttgcaaggtgaggcacacatgcatcccttttaaagttagagggtttgggaaaggatgttctgggcttggacactgctggaggagtctggcctgggcaatctggcctgggcagcctcctgatggggagaggagcccagcctaaagaattctaaggcccaagggtttgtgctgttttgcttttgtttattaaagctgcacaaactgctttactgtttacagttcaccagcctgccaagaggcagattactataaaggtgggttccgttgtttccgttttcagtgtctgtccagaggtggctggtaagcatttcctagtggtaaggctgtagcatgaggactctatgagagggcctgagtcttgttttctggctcattcacttcctgccttgtatgtgcctgcccagcactgagccacttaccaggaaatggtggtgaatgcgacatgggcctgccctcaggaagtccccagtctggtggggagagagtgagcagggcccccacacactcccttcccactgggtgcaaagtcctctgctgggggacatgtacaaaacatgagagaacaaaggaggtgacgatgcctggttgtgcatggctgggcagtggcaggaggggctccgggaaacctttgcagaagtgacttttgagctgggtcctcaagaggcctagaaatatgcaagacagaggagggagggaagggcttccagtcagaaggaatagaggcatgaatgggcacagtgtagagaaagaagttctctgtgtatacagagaagtggacagacacgggggccaagggtaggttggggccagttgtgtgaaccccctcaagtgctgtgccagaaaatgttcccttcactttcattgaaataggaactcctcctgtgatctgtgtatcccatggaaggaggggtctcttgagagtcatttgtgggagagatgaggtggagcccttcatataagttgagcatccctaatcgaaaaatctgaaattctttgagtgtggacaagacgcacaaaggtcatgctcataggagcattttgaatctcagattttcagattggggtgctcaattggaatgtatatgcaaacatcccaaaatctgaaaaaaaaaaaaaaaaaatctgaaatcccaaacacttctgactccaggcatttccggataagggatattcaacctgtacttcaaggtggtgtttgcctttgtggtgtggtgtgctgtacattaagaggtttctcatccagaaaggggactggaaatttgatgatggaaatttgaggcatgtaccaaaacacattaggctggttcccaaaggaaataacaaaagcaaaggaagcatgcggaggtgtctctttctgctgaatcatttaagataattttgctcctcaggcagaaacaagaaagatgtgtcattctgcacaaccgttcccttgggagattgaggagcataatttaagagggaggcatcagcctctcaaagggctcagcttcatgcgatatgtgggatgggactctgatgattgcttcctgttgcggagattcagggagaccccagccctagccagctgcatttggccaaaggagctggaagtctcaacacaatgccttccaggtgctgacctcaaaagatcccacatttacaccaaactgagggacacctttctgttttctctaccaggcaccgcctagaatccttcgatctcgcttcaggaagaaaagtacctcatcctcggccaccgaaaccacgtgagtgagatgagccaacagcaccggatccacagaatgtttcttctctgccttaaagagctattcactaataacatagaaatccgcaagctgggtgtgctttgagtgtgcagcctcacaaacatggccttttctctctccccttccacttttaaggatttatttttttcccccttttctttattttgctggggagaggctaaagggaaaggtagtaggggcgggggtggtgacctttaagtcttctgaggttggtaattttccacaattggattgtcattatagacagcagtgtgttttttagaaagataagagaatcacccctatgctgctgagatgtacatttgtaatttatctgttgcatacttagtttttagtcctgtaaatgcaaacacagcattttttacaactttctttgttcttggtacttatactttgaactatgatgtacatatttatggcttttggcttttaatataatggacttgcaagggctgccagaggttctgatatgtaagaaaactgcaaaaacaaatatagacaaatattttgattctagagaacgtctcagatgtgcttataaagcttccaaatacaactccagtaagacatccctttccctgcaggagtgtggtctatattctttagatagttgtttagtcaaaagaccagacaagttacaaactaagagaaacaatatttcacaacacagtaaagtgtgatgagaggtcaggggaacatcccagtaaaagagaagagtcacaggaagctcatctcctccctggattctggattaggagcttctgaatcttttccagggataggcaggtagctcactcttggtgcaatttcttgaggatgggaacatgtagagctgctggaaggagtaattctgtgcttgacaaaggacgatttctcctttatcgtgaccagtgctgccgatttcctgacagaggagcttacactctgagcaccttgttttagcgaactctagcaaaacttgtttagcttagcaaaaacaaacacacaaaaaactgagaactctgctgtttcagatatgccataacatacatctgaaacacatgtgtaacaatcaaaatggtgggctctagaatggttttggagctcgagatcttcatgggttagacttgctggtcagacccaggagcacctgtggctcacaccttctgttcccctcctggcctgtgcagaatgtaaacagcagactcatactcaatgggcactacaggccttatcagacgttttatacaagcctggattgcttagtaggggaataaggcattctctgagggggctttccacttagattgagaattttatttgaaaagaatctggtttaaatggcattgtggtccgaggtagctgctctccccactgagagctgagccgaaatataagaataatatatttgtgcttcgagttggtgtttctttcagtgtaatgcatgcagtggtcacaacccagttactcataatatttggattgtatttgttcgtagatatgcccagaagactagagaattagtgttatataccatatagaacttactgtcagtcaactataaacaggcccaattaaaaactgttccattactacgcaaacacatattagaggcctttgctgatgacacattagctggatcttagccaccccagaaagggtttgatttgaagctgattgttgccagatatgcatattggaatcccatctacccatagttcctctgaaggtgattttgtaatttgcaaaagggtataggaaaatatacctaaaagcgaatttgtggctgagaggataaacagaagctgtttgctcatgttctgtgccccacacccaccaatacctaaatctgttaaggaagacagaaaatgttttctttgtgctcattgagtagttccagacagaagaagaatatactctttaaaatgtatttacctgttagttggaagtacccagaattatcagaaacgaatgcaaaaaaaaaaaaaaaaaaaaaaagcttacacagcttcttagcaatttttttttttttgccgaaacaataaattgcctttagcagcagtttaaaatcctatcgtgaacaacctatattttcgccattttacaatggagagttgtgacaagtacaggttatcaagtttgcacttaactatgccaaaaaaagtttgaagcgctctattctcagacatgctgtattattacttctcattcaagattgaaaaatataaaggtatccaaactctgtcttaatgtaaatgtaactatttttccttcaagtgttgactagggagtcggtttctctcttaaagacactcactgtacaactgaaagcagctgtcatatttctggcaaaatgtgtttacgtatctgacaagttgtacatttgtgtatgaactgacataaaatgtgaaagcctgtaagtgtacatgtagtggtgtggtgttctgtctagaggatacaactgaatgtttttaatttgctgacttacagacacaggctgtttacaaaatgctagctggaaagtctgtaatgttcatgtcataacttttagttaattgccattgagcacctgttctgaggaggtgagatgtggacttgtgcttataaactggagagtttagtcataatccctcctggctttgtgtgaatagcttgctcactttgctggcctttgaaatgtgttctccgtgataagctatccatgtgtttgtgataagagtgcttgtcaaccatgaccatctttgagccttcctagtcctccacctggcacagtatttgaaatggcaaaggatgtgcttcatcctctaacagtgtacactcccagagctgatattctggattttgactgtgcacatttcctctagttcatgtctgtagtccctatagaatgatctgtaataaaatagtatactggactgtgcatcaaagggatgtaaaattacagtattccaaaggttgaagttctgctgttttgttataatgcctgatacacatcttgaataaagtcttaacatttttcttttaaaaaa

SEQ ID NO: 300 - DNA, 27098 bp, Homo sapiens
caggaccatggaactcagcgtcctcctcttccttgcactcctcacaggactcttgctactcctggttcagcgccaccctaacacccatgaccgcctcccaccagggccccgccctctgccccttttgggaaaccttctgcagatggatagaagaggcctactcaaatcctttctgagggtaagacacagacgaatggggtctgagggtgagctgcttcttgccttggtacttggggaagcttcaccaaacagaatgaggcagacttccagagtcaggggtggcacgggcatggttggtgagtacggagcatggtgaagcatgatgggtggtattattaggagaaaagcatcaaattaaatttagcagagtttatttgagcaaagaagtgactcatgagttggacagctccctaaaccaggaaagacaccacacggcagtatggtcaagtggtatttacaggcagaaaaaggaggtgacatacagaaacagcctgattggccacagatcacagcttgccttacttggtcacaatctgagcagtttgcagcctgtgtggactgaaagcccagctgctctgattagccaacacttggctacttgtcacaagaatatattcatttgggccaggtgcagtggctcatgcctgtaatcccagtgcttttggaggccgaggtggtggatcacctgaggtcaggagttcgagaccagcctggccaacatggtgaaaccttgtctctactaaaaatacaaatattagctgggcatagtgatgcgtgcctgtaatctcagctacccaggaggctgaggaaggagaatcacttgaatccaggaggcagaggttgcagtgagccaaaatcttaccactgcactccatcctgggtgacagagtgagactccttctcaaaaaaaaaaaaaaaaaaaagaatatactcccaagttaggttgcagttcactctacagagagagctttaggtcaaatttaatttaattaaacaattctccccttttggtcagcctcaaaattttgagattgaccaaaaccttgggcatcaacattacttctgtcaccatcataatggacttgtctgctctcagtatggaattcacaatggacaatgtcaacgtagttgagtgattctttaccttttcttcatgtttttgttgttcccactgtaatgagcccactggatgtacaaagaatggctgcatatgagcatttaagactctttttttttctgagacagggcctcactctgtcagccaggctgaagtgctgtggcatgatcacgtctcactgcagccttgacctcccaaggctcaagtgatcctcctgcctcagccccccaagtagctggaactacaggtgcatgccaccacgcccagctaatttttgtattttttgtagagacagggttttgccatgttgcccagactggtcttaaactcctgggctcaagcaatccacctgcctcggcctcccaaagtgctaggattacatgtgtgagccaccgcacccggccaagactcttgagaaaatacaacacatcagggagactgttatgatggctctcaggagggtaatacgaagaaaatgaagtcactgggcctgtaataaactttgaggaatgtggacttgggggtatagataaggtccactgtccacagagagaagaaaggctgttaatagtctcttttaacttgagtgtgtccatgaaccaaactgatcaaaatcgaataattcgaagttcagacaataaagatagttcaatagtattagagtccaattggtcatagattttgttcagggcatgatggtaattaaggaccagagcttgctataaaataacttgatttatagagacattcatttgtagttggcctggtaacatatagtatcctggagacccactagaagaaacattaagagtagaaaagtttgggatagccaggcttgctgtgttagtccattctcacactgttataaagacatacctgagactgggtaatttataaacaaaagggatgtaactgactcacagttccacatggctggggaggccccaggaaaatacaattcatggcaaaaggtgaatgagaagcaggaaacttacaatcatgatggaaggtgaaggagaagcaagtaccttcttcacaaggtggcaggaaaaagagagagagccaagggggaagagcctcttataaaaccatcagatcttgtgagaactcactcactatcacaagaacagcatgggggaaaccgcccccaggatccagttacctcctactaggtccttccctccacacctggggattacaattcaagatgagatttgggtgaggacacagagccaaaccatatcacttaccatcaccattcaggatgcttgcaaaccaactgctagctgcacctgtaaacacatatctgtttctttcccctgagaaatgtccttagtgtatttgtggcagtgtctagagaaacagcagtgtcagccgcattttaaattaagttatctgcactagtgaattcactggaaagataagagcaatatttggttttcttcagcaccatacacaagcctccaagatgggcatagaggagatctaaaattgcgtgatgttccattaagcgtttttgttgccacaaatgttctcatctcagtttggagagtggcttctacccatctgaactccttggaggttcaattagctgcaaaattcaagatgtcccttaatgtataacttagcctcagattccatacaactgtcacccaaataccaccaagaatgagcacccaggaacccaactggaaccttttctgaacagaaaccaacttatcttcgtcgattttgaggttgatagtaatttcagttattgactgttttggcttttaactatgggaggtattaggaaactctcagggaaacaatttggaaagcagcagtgagctaggccaaatagcaagttctggacctgtgaggagaaagaacagagtaagcaaacctcaagatactcaaggtaggcactcgtggtgttggaaaagagggtcacctactggcattagagcagagatcagttagatttgtttacccataagtctgcatagctcctgaacaaggtgggaaacttacttttttgtggtctttttctagcatgctgcgaaggtgcataaccacatttagttggaaagagactttactgtatttacttatttatttgtttttaatagagttggggtcgtgctatgttgaactcttggcctcaagcaatcctcccatctcaatctcccaaagtgctgggattacaagcatgagccaccatgcctggccactttacatatttaatccagtaacattacacacgcaattgcccacacccccataggtagtccccaggtcttgcatacgggatgcctggaagcaaaatatgccttttgcagccattattcagatacatttcctatatttagtagtgattatgttattagctagttaatagtatgttattacgtactgttattatattaactaactaataacataatcactactaaatatttccagtgagtgcaaaaaagcaagtggcaatgatgtctagaatatcaagatatagctttccactcctcctttggggtttctgggtgattctcattgggaacatgaagaggcattggcaccagtgaaattatttcctgattttggggcgttggttcagaaactcaacaactccttgttttttttgtttgtttgcttgttttgctagagtataagcctttgctaaagccattcacagattatagtcctatggattttcttgtaaggaaagggaaagggttaggacagcaagaaatggggaagaaaggataaaagataatgctttcatgatggaagagaaatcttgatccacaatcttggaaaagctgtccgcatataagatgccaactgcttctggggaaaaacttccctggtcagctttgccttaaggtctccaacagacatacagttctaggagtctagaagggtcctttccaatggagagatgtggatccaagatccgagaccctgacattttgctacagagaagaacttggcattgtccttcccaatggagtacaaggaacagtcttagaagaacttggtacggtctcttccaatggagttcaaggacagtttgtctggtgtcatttccaaagggcccaacctctaaattctagatcatgaaaggtctggttgtcatcaaccgatgtgtcatcaatgactcattttacctggtgaaaacatgctttggcataaagtattatagccttgcattattgagtcatatcagagtttataagagtgggagatacatgagattctattattaggggcataggccctctattactattttacaagagatctatctatgtctttccagtaggagtggatctgattgccatcaatcaataatacctgagaccaagggactccaatcaattcagcatgctttgcctaatgatatttgtttgtaatactgttgcgggacaatcaaagactggagagaccaaaaaaggttcaggagagtttattaaattaaggtgatcaccggttcagccagacatacatccagaaagtctgagccccgaacaaaggcttttcctacttttaaacatattaaggtgggaactacatgaggcaggaagccagtttcagaagtgagaaacaaagcagttaaataacatttcttacatcttgagaaagacatgtcttgcaacctaaccttatcggtccggtgaccctgcagctgtgcaggaactcactgggcctgtaataaactttgagggatgtggagttggggagtataggtaaggtccactgtccacagagagaagacaggctgttaatattctcttttaacttgaatgtaaggtgtggtcatactttgcagcaaccttaagaggattttaaaatttatattactactactattaggttatagttgatttcattaattccttcttcaataccttatttaactgttttaccacttgtctagtgaaacaagtacctctgtcactggagagttctccaggaatgcccagtaaggaaatacattttctaataaccttttatctacggttatggcattgattgatctttgtgcatagaaatgctttaatacaaccagaaaacatgcaatgaagctggcagttgaattaactccagcttcaagtgttcaaatgatctaccaagtgccagaaatatatcacctgaggtttttgttgtcttactagaattatggatttgataaaccaaatattagttataaaccatttagtaatcttagaatagtcacctcatcaatattttttcactgtttggatcattttctctcttctatgatgagtcatggaatacggagcttttagtaatggaaattttaagaactcaggaaggaccaggcggccatctagggtctccatgagtgcatgcttcacattggaattacagactctaaagtacaaattttaatacaatgagttgcaatttatgcttctctaattcaggtacataacactggtttattaaataggttatcataggtaatttgatggtgccattgcactccagcctgggtaacagattgagaccctgtctctgaattggaactgcacgggggcactgtccttggaggggtgaatgggcatgaagaggtgtctgggtatgagccacaggtatagaatttcactcttctctgccatcctctgttacatcctgggtacctgcctgccactgaaagaatgaggtaaaagaggtggtggcacgaatcaaatagatcttgctgtgccaatgagagagagcagactagcccatgtcagtgccaggagagtggaggagagagggagagcaggagaggagtgtgggtagggagtgctcatcaacagtacacatagtgccctataccggtaactgccactggctcagtatttacctgggttatcactgcttaccatgcctgattttatgattaattatctacttatcattactaatccatcaacccactttccaatgggagaattagaacactgacaataccttccagctcctcttccccttccccctcccatgttgaccatactcctgaatcttaggctcgttatccttttactattaatagagttatttttttaatttctgatcaatggtctttttaatgataccaagtacagagtatatatgccaatactactatgaatttttaaattatttgctcagacagaatacatggacatacaaatgatgaatgtgataattgtcatacatatatatttatcttagacacttagtcaaaacatgtggtctttggttatcagttagacactgtcactttacctggaagatacaaggtaattggtcacagactctcaaattatgaaacatttagatttttcaggggaatgacatggagggagccaaggagtcttatgattagataagatgttgtttgggtggctcacgacaccactgggcaacactcaaagaggtggtggcttatacctgtaatcccaacactttgggaggctgaggtgggaggatcgcttgaagccaggagttagaaaccagcctgggcaaccaaacaagacctggctctacaaaaaagttttaaaaatttagccaggcatggtggcatgtgcctgtagtcccagctacttgggagactgaggcaggaggatgacttgagccttgtagtttgaggctgcagtgagctatgatcacgtcactgccctccagcctgggcacagagcaagaccctgtctcttaaaaaaaaatcatctgcaatgtgaggagtgataacatttaggaacgtgtgtataggtttaaatgctggtcaaagacatcctacacaattcgctgaaccttctctctaagggttttttcccaagctctgcagacgctatctgggcacaaatcatgcctctgttaacagaatttgctgttccttctagctcttggtatcccactgcccgctttctttatgaaagctggtatggtcattgaatatcccaatcctttacaaatttggaaacaagcaaaactgtcaatgaaatttgtatttgcctaaaatgagttttctttctttcttttttattattattatactttaagttttagggtacatgtgcacattgtgcaggttagttacatacgtatacatgtgccatgctggtgcgctgcacccactaactcgtcatctagcattaggtatatctcccaatgctatccctcccccctccccccaccccacaacagtccccagagtgtgatgtttcccttcctgtgtccatgtgatctcattgttcaattcccacctatgagtgagaatatgtggtgtttggtttttttgttcttgcgatagtttactgagaatgatgatttccaatttcatccatgtccctacaaaggacatgaactcatcattttttatggctgcatagtattccatggtgtatatgtgccacattttcttaatccagtctatcattgttggacatttgggttggttccaagtctttgctattgtgaataatgccgcaataaacatacatgtgcatgtgtctttatagcagcatgatttatagtcctttgggtatatacccagtaatgggatggctgggtcaaatggtatttctagttctagatccctgaggaatcgccacactgacttccacaatggttgaactagtttacagtcccaccaacagtgtaaaagtgttcctatttctccacatcttctccagcacctgttgtttcctgactttttaatgattgccattctaactggtgtgagatggtatctcattgtggttttgatttgcatttctctgatggccattgatgttgagcattttttcatgtgttttttggctgcataaatgtcttcttttgaaaagtgtctgttcatgtctttcgcccactttttgatggggttgtttttttcttgtaaatttgtttgagttcattgtagattctggatattagccctttgtcagatgagtaggttgcgaaaattttctcccattttgtaggttgcctgttcactctgatggtagtttcttttgctgtgcagaagctctttagtttaattagatcccatttgtcaattttgtcttttgttgccattggttttggttttttagacatgaagtccttgcccatgcctatgtcctgaatggtaatgcctaggttttcttctagggtttttatggttttaggtctaacgtttaagtctttaatccatcttgaattgattttgtatactaaaatgagttttcaaaaggatctttgtggctaccttattagttcatagaaagtggaggcttgtctggaatgatattaaagaatttttttcattttaattgttttagagacagggtctcagtctgttacccaggctggagtacaatggcacagtcatagctcactgcagccttgaactcctgtgctcaggagattctcccaccttagcctccagagtagctgggactaaaagtgtgagccaccatgccccactatttatttttgtagagatgtgtttgggggacggtctcactatgttgcctaggctggtctcgaactcctggactcaagcaatcctcctgcctcaacctcccaaagcattgggataagttttgcatagacatgtttgaccctctcccttcctttattgcagcaaagatttccattttctcacagggaggacttggggcaaattgtttttgtcgttgttattgttatttgaggatgtgggtgggtcatcttggttaatgtcagtgcaagaacggtgtctgctcctcattattggggttccttagctattcaggcaggcagcagctcccttgagaagacttcctgacccccaggtccccatcatatgctctcatacaccagctgcccctccttactgagcctatgtccttgatagtgctgcatttacctgtgatcctgtggctgagctctccctcacacttccagacaaggaaggcctgtgaggtatcagcacagtgctgaacatagtacctggtacacaataggcatttagtaaatatgtgaacaggaacaaatgaaggagtcagtgagtgaaagctccaagcctgactcagcggaactggcagtcggccagggcctacaaagtgctgcctggccctcagtagggggtggcagatctggggatccctcttcaccaaatagagttgcatcatacaggtaaaggtcccaagtgcctattgttttcttttcatcattttccatgtgtgacaagagtatcacgcaatcatgtgaatcaatggacttagttttctcactagactaatgtgtctaggaattatctgtgttgtcatggggattttccaggtgtcatttacaactacctgtggacaagatgaggtgctaccctcatcttagaattagggatggtggctgggcatggcagcccatgcctataatctcagcactttgggaggctgaagcaggtggatcaactgaggtcgggagttcgagaccaacctgaccaacatggagaaaccctgtctgtactaaaaaacacaaaactagctgggcatggtggcacatgtctgtaatcccagctactcgggaggctgaggcaggagaattgcttgaacccaggaggcggagtttgccctgagctgagattgcatcattgcactccatcatgggcaacaaaagtgaaactccatctcaaaaaaaacccaaacagaaacaaacaaacaaacaaaattagtgatagtgatgctcagcctggggaaagcatttgtccagtggcacacaactgggaaaaggggaagctgagatccagcaggaggtctgtctccaaagccctcctagactaaagctgcttaacaatttgtggattatgaaattctcatagagtttgattaaagctgtggccccctcttttccaaataggcacatacatgtttgcataaagttgtgaggcttcacacactccctaaaactctttcataaaccttccaaggatcctctaggtattcacgaccatctattatgattgcatctcttgggggtggggtaaagagggagggcatgagcaagtgtgcatcagggctgaggaaggtggcgctgttgcttctccatttcccaataagcttccagattctttttgatgtcagagggatgtgggctcgtgtctcagattcaacccgtatgcattgagtcacagttttctcttccgtcagttaagatcatgacaatgagaatgtgtgcccctaaggtggttgtgaggattaaatgggatattgcatacagctagtatataataagtgctcattaaatggcaactaccttgatccactcattcatttattcacgaatccaataacaattcactgggcactttctatgtaccaggaaatagtctaggaattgatgatgtggcatcttggacaagacatacgaggtcactgcgcttatggacattccattggcagagacagataagcaaaaaataaacagataaggaaatgttaggtggagaagagctacaattaaactaaagcagggggatatttcagacagtgatgagaactacgttagattgagtggttaggggaagactgtcttgtttttttttctgagcagagacaatgaaagattcaggtggaaggcactagaaggaggcaggggtggctacaagaatcctgaaacaggaaaaatgtcagagaacaacatggaggaatgagtgggaggagaagtcagagcggtaatagggccacgtcatgtaggaccatgtgaaccctcagtggagacttcagatcttattctcagcaaagtgggaatattgtaggccttggtgagcacgtggatattaattattttacattttagtggggttaccctggcttgtggggcagtgaaacaattgttaagtggagtaagcatgtcatccagaagtccagtgaaggggctttgcagagatcaatgcagggcatttgtaagtaaacttaacaaattttatgacttttatgtcaagtttttattgaacttgaacatcactgtaaaaagcgcacagctcaatgaattttcacaaactgaacatactcatgtaattgacatgcaggccaagtagcaagaatgccccgaaaccctgcaccctgttcttttctattcactatccacctaccatcttgatcatgggttgattttatctgtgtatgaacttcttttttgtttttgtttgtttgttcctgagattgaattttgctctgtcgcccaggctggagtgcagtggcactatctcgcctcactgcaacctccgcctccccgggctcaagcaattctctcgtctcagcctcccgagtagctgggactacaggtgagagccaccatgcctggctaatttttgtatttttagtagagatgggttttcaccatgttggtcaggctggactcaaactcctgacctcgtgatcagcctgcctcagcctcccaaattgctgggattacagatgtgagtcaccacgcctggccctgtgtttgaacttcatacacataaaattatgatgcattgactcttttgtgcctagttgcttccactcaacattatgcctgtgagtttcagccacgttgtcgcctgtagctgtggtttgttcttttttgttgctgtatactagtctattgtgagaaccctcactgattgtctatatctatattgatgagcattttattaagaaagcttctgtgaatattttgttcattttttggtgaacacacatacacatttttgctgggcatgtacctgggagtgaagtggctggtttcctgggtatccatttgttcagcttcaggaaatactgcccagcagttccccaagtggctgcacagtaatcccaccttatccactggagatatcttctgagacccccagtggatgcctgaaaccccacataatactgagcactatgcatactctttttttttcctatacaatcacattatatagggagggtggtatacacagtgcagacatggtggacaaaggatgattcgtgtccggggtgggacagagtggatggtgagagatatcatcatcctactcagaatgatgcacaacttaaaacttacgaattctttatttctggaattttccatttaatattttcagactgcgattagctgcaggtaactgaaactgcaaaaagcaaaaccacagatcataagaagtatgcggtgggggtgatattcatcgtattttatcaaccatctttactgtttagggcacaagccaatcagagcagaccctggctgggccacccattaacctaagcttgtccaacctgccttattttgttgttgttctgttttgttttgttttagctttttagcagcctgaagccatggttttcagtttctgtctccagtgatacacagaaaggaaggatgaggaaggggctttactggcccaaccagaaacggaaactaagaacccatgactgtattctctcccttggacagcgttaaccattaacccttaattgctgggtcccagcaggggaaagggcagcctggggaggcggatgttggggaggggctaattaccaatctggtatgtaagtattttgatagttttacaaatgaggtgtatgctgactaacagccacccctggtgtggatgtgattggcagttccgagagaaatatggggacgtcttcacggtacacctgggaccgaggcccgtggtcatgctgtgtggagtagaggccatacgggaggcccttgtggacaaggctgaggccttctctggccggggaaaaatcgccatggtcgacccattcttccggggatatggtgagagcctcagaggcactgggagggggcgggtggggggtgcatcagggaagggagtatatgggaggaagaaggactcagagccttcttccaacttcttctacaaccaacccacacctcccctgcaccccaggtgtgatctttgccaatggaaaccgctggaaggtgcttcggcgattctctgtgaccactatgagggacttcgggatgggaaagcggagtgtggaggagcggattcaggaggaggctcagtgtctgatagaggagcttcggaaatccaagggtgagtcctgggggatgaataggaaagaaagacaatgaaacactgagagatgcaggtgcacgggaatagaaagacagagaggtatataagggcacagacagagacagacgaaactggagacaccatcagacagagggatagagacagagagggagagagacaggggaatagagagggatggggatgggcaggagagaaacacagagagccagggaaagagagagatgccaggtgtataatgtccaagagttactcaaagaggctggatgtgatgactctcacctgtaatcccagtactttgggaagctcaggcaggaggattgcttgaggccaagagttggagaacagcctgggcaacataatgagatcctgtctctacacaatatagaaaagaagtgagccacgcatggtggtgtgtgcctgtagtcccagctactcaggaggctaaggtgggactacaggatcacttgagcccaggaggttgaggttgcagtgagctgtgattgtaccactgcactccagcctggacaacagagcaagatcctgtctcaaacaaacaaacaaaccctcaaagacatataatttcatggatcaattgtgtctgtcaaagtcaaaaacggaagttaagtaaaagaaaaaaactacagacatttaacaaataatgaactgtgttttccttgccctgggtgaagtgctgatgagctggcagtgagcagacaggccaggtggggtgttctgcccgggtgcagctggaggggtcatcaaagaatcactaggttatttttgagttctccataacttggtgtctgtgagacatgtaggtgaagggtctctggctagcacctccatctcattcatgccaggtgtttaccatctctcttatcaaaatttctcaagagactctgggatgtaaatgcagaggctgcatggggaggtagagacccaggagctatagggaaacggggacaagaagactgaagagaaggacaggaagaaacagtgacacaggcaggaggaaagagacagatggagggaccaaaacaaaaaaatataggttgggtatggggctcatgcctgtaatcccagcactttgggaggctgaggctggcggatcatttgaggccagcagttcaaaaccagcctggccaacatggtgaaaccccatctgtgctaaaaatacaaaaattagccaggcttggtagcacgtgcctttaatcccagctactcaggaggctgagacaggagaattgattgagcctgggaaatggaggttgccgtgagctaagatcacactactgcactccagtctgcatgatagagtgagactctgtctccaaaaataataataataataataaaataaagaacggcaggggggagacaaatatacacacagagagacagaaagaaacaaaggcaaagagaaattgaggcagagaaaattagagagacagacagacaaagcttaggaaaaggtctgcagaggaatgagagaagacaggcaagtgagaaccagagagaggctgcactaacctgatgttcttgggtccttacagaccactctccctccagctggggccagtgctgagcctggtgtatacaggtatcacttaacaagtacagaataattcccagaagactggagagccctagatgtggaaagaagagattaagggggagtaataggtaggggtggaaagatggttttttatttgttttaaattagagacggggtctcactctgtacccaggctggagtgcagtggcacgatcatagctcactgcagcctcaaactcctgggcccatgtgatcctcccacttcagcccctggactatttcaactgggactacaggcatgtgccaccatgtctagctacatttttttttttttttttttgtagagacagggtctccttatgttgcccaggctggtcttgaattcctgatccttttgaatcaggctcccgaagtgctgggtttagaggtatgggcccctgtgcccacccagggctttttaatttatataagcaattgattgaacacctactctgcccagcccctatccctgggatttaactgtactcactcccagagtcagaggtggggcctgagaggaggtgcagagtgagaaccggctgcatggactctatagctgtgttgcctgggtctaaatcctggcctcagtaatgagtagctgtgcaactttggtcaaattactcagcctctcggtctgcccatctataaactggagctaataatcaaattgcatctgcctcacattgttgtagtgagagttcaatggaattacgcgtgacgtgctggtacataattagctgttacggttattctcatgtttaccattactgagtgatggcagacaatcacacagagataggtgacagcctgatgttccccaggcacttcagtctgtgtccttgacctgctgcttcttcctaggggccctcatggaccccaccttcctcttccagtccattaccgccaacatcatctgctccatcgtctttggaaaacgattccactaccaagatcaagagttcctgaagatgctgaacttgttctaccagactttttcactcatcagctctgtattcggccaggtcagggagacggagagggacagggggtgtgggggtgaggtgaacacccagaacacacgagaaaaggatgacctgtcttgggggctcagaaatgcagcttatccttggaagaaacgcagacatgtgaagaatcagggacatggagacctggagggaggagagacggtgagacagggatagagacactgagagagagaatgaggcgtgatggggaggcagaaatagagtcagagagagactgagagaaggaagatgagcaaaaacaagacaaagaagagcagaaatcaagagattctgagagacagagttgatgagaatgagtgtgaaagagagggagagagagagaacgaataaggctttgggcttcatgtctattctgctcctggatgtcatttctgttttattttttttagacggagtctcgctgtttcattccagctggggtgtagtgttgccatcttggcttactgcaacctccacctcccgggttcaagtgattctcctgcctcagcctcccaagtagctgggactgcaggcatgtgccaccacacctggctaatttttttttttttcttttcgagacagagcctcgctctgttgcctaggctggagtgcagtggcacaatctcagctcactgcaacttccacctccctggttcaagcaattcccctgcctcagcctcctgtagctgggattacaggcgcctgccgctatgccaggctaatgtttttgtatttttagtagagacggggtttcgccatgttggccaggctggtctctaactcctgacctcaagtgatctgcccgcctcagactcctaaagtgctggaattacaggtgtgagccaccatgcccagactgcttctggttcttctgtatccttgcttctcagtctttggtaaagctctccacctaaagaaaatgaaggataaatgacaataaggaacagcatttcttcattttctcccatttctccttctccctctgtgtttttttttttaactttccccagattgtaaaggcagtcttctgctcttttaaaacaaaatactaaaatgtctccttatttattaacctggaaatatgcctattacatattaaatttaagaatatcaagctgcagaacagtatgcatagctgtagtttgttgttgttgttgttttcagacagtatcttgctctgttactcaggctggagtgcagtagtgtgatctcaactccctgccacctccacctcccaggttcaagcaattctcatggctcagcctcccgagcagccgggactataggcgagcgccaccacacccagctaatttttttgtatttttagtagagatggtgtttcaccatgtcggccaggctggtcaacatagctacagctattaagcagggatgtatgttggattcacatgtggggttgtcacagttatggattttcaggaccctactttctgggcggtctgatctggaaagtctgggatggggcccaaggtgagtacttgtaacaagcccgaccagtaattctaatgttctcctcccaccgagaaccacagagaaaagtctggaaggagacccaccagacagttaacaatggttatctctagaaggagagattaagaaggaaatttacatctgactatatatgtttgcatttttgcaattatttgcaataaattaggcattccattcttcatcaaagtaatagaaataacctccaaaatacgtagtcctaacatgtcagcaggcttatcttgtgtaagaatcattttattaatatctgacacagcaagggagatgaggagaggtgggaagagggagagaaaagtatgagaaagacaaataaacaggctgaggtagacaatgggtgacacagaaaggaagtgagacagagactaagagagatagaaaggagagaggcagggagatggggcagaggccaagaaaaagacagaaggatgagggaggaagatgcagaaagaggtaaatgtgagatagatcaaaggagatatagagtcagtgagtgaggggttcagaggcagaggggagtggggaagtggggttcccatggagggattggggcccaggaggcgctctctccctgtgacctgctagctcagccctaggcaaacctcaccaccccttctttcttgcagctgtttgagctcttctctggcttcttgaaatactttcctggggcacacaggcaagtttacaaaaacctgcaggaaatcaatgcttacattggccacagtgtggagaagcaccgtgaaaccctggaccccagcgcccccaaggacctcatcgacacctacctgctccacatggaaaaagtggggtctgggagaggaaaaagggaagggaggggagggagggcaagatggagaggtgagaagagggagggaaaaggggtagggaaggggaagatggggagggaagaagaaagactagggaggggagaatagggaaagggaggagagaacatgaggaaggaaagaaagatgaggtgaaaggagggagaaaatagggaggaggaactgagacagggagagaggggaggtgggaagacagaatgaaagacagagggagagagagagaagactggctgaggaaggaattcggggcaagggacaaaaatacagcaacaagagaaaaaactcacagaggcagaaagagacggggacaaaaagagagaaacacatcaaagagatgtggagagagatagaaacagagttaggaagactaaagagaggctgagagagatgagttagagatacgcggttggatgtgtagaggacagagaaaagcaaactgggccagatagtgtcaaagacctttaggccaacggagggcagccagggagatgggcgtatacacagcaaggctacagcctcccctgaccctccccttccttccctactgtggacgcaggagaaatccaacgcacacagtgaattcagccaccagaacctcaacctcaacacgctctcgctcttctttgctggcactgagaccaccagcaccactctccgctacggcttcctgctcatgctcaaataccctcatgttgcaggtgggccagggacagccagtcaagggggtcttctgacctccttctgagctgcagaaatggggctatgggtaccacctggatgagagaggggatgctggcttcctattctgggagcactgtaggctctgggctagattccaaccaagccaattctgttggtggatgcatggatgcatgaagaatctgtccatgcgttctcccactgttttcttccatcacttaaggattttttgttctaaggtttttgtttgtttgtttgttttttgttttttggtttttttttttttgtcttttttgagacagagtctcgctctgtcacccaggctggagtgcagtggcatgctcttggcttactgcaagcttcacttccagggttcacgccattctcctgcctcagcttcccgagtagctggaactacaggcgcctgccaccacacccggctaattttttgtgtttttagtagagatggggtttaaccatgttagccaggatggtctcgatctcctgacctcatgatgtacaaatttagggggtacatatgcagttttgttacatgcgtaggttttgtaatggtcaagtttgggctgttagggtatttatcacccaaacagtgtacattgtacccattaagtaatttctcatcattcaccccccttctgctccctcactcttctgagtcttcactgtgtatcattcctctctctgtgtccatgtgtacacattttgtagcactcactcatgagtgagaacatgcaatatttgactttctgtgccatcacttaaaaatcgatccatccacttatcatttcatctattcattctttaattcattaattaaagaatgtataattactgattctttcatttatgattcatctaaggacatatactgtcattcatttatttggattacttgatccacaagttgatcctttgaaacagtggtatgttgatggactatttgtcattgattcattggctcattcattcattcattcatgcattcatccatccttctacgaactaggtttcactcttatccttccatgagtcaacctttcaattcacccttaatccatccgtgatttccttcatttatcacaataattcactcatttattcacctctgatctacttatcattcaatccagcctttcatttactcctttatttactcatacttcactaatttaattattcacttgctcttccataaatctagccattcatgtgattattcattaattgggttcattgatttctttgtctatggatcattcattagtgattaattaatcaatccatctattaattgataagtaaatacagacatccatttattggtttgttcatttattcatcaatctttccatccatgaattgatctattgattgattgattgatgtttttatccagttgttcatgaattcatctattgttctattacactgttatatacctgaggaccaagaatagtgtctcaactatattataaacacaataaatattagttcattttctactcatcttagagagggtgttttgagaggtttgtagcctggagttcttaatctgaaattccatgcaaaatcgtggtgtgtgtgtgcatgtgtgtgtgtgtacctgggcatgtgggaagaggatctgtaatattcattagatttcaagcagtgagaattcttgttgcttcctccctcctcccctcaccccatgctgattactttgaggggtatcaaggatctaaccctttactataggtttttcattggtcaatagaaagtagtgtccttgctgaaaggtctctttttaaaaaaatttttttttcttttgagatggagtcttgctctgtcacccagtctagagtgcagtggcatgatctcggctcactgcaacctccacctcctgggttcaagtgattctcctgcctcagcctcctgagtagctaggaatacaggtgtgcaccagcacacccagctaattttttgtatttttaggagagacgggattttgccatgttggccaggctcatcttgaactcctgacctcaaggaatccacccacctcaacctccaaaattgctgggattacaggcatgagccaccatgcctggcctgaaatgcctctttaaaatgagattcattggtcttcttttctgtacagagagagtctacagggagattgaacaggtgattggcccacatcgccctccagagcttcatgaccgagccaaaatgccatacacagaggcagtcatctatgagattcagagattttccgaccttctccccatgggtgtgccccacattgtcacccaacacaccagcttccgagggtacatcatccccaaggtaagaccggctggaaccccatagccctcctgtttgggcatcctggattctcttaatccccgaactcaaccttttgttagctccttaattgagtcccgttgtttttgttttttgtatttcttttttgtggagtgtgtggagggttggagggaatggcaatatcttttgatcttgtgatcctccctcaggacacagaagtatttctcatcctgagcactgctctccatgacccacactactttgaaaaaccagacgccttcaatcctgaccactttctggatgccaatggggcactgaaaaagactgaagcttttatccccttctccttaggtaagctggacccacaatttctttcccagacaccagagggcaggtactatccccaacttgagaaaaacaacgagagatactgattatttgagcacttaatatattctgattgcttcacctgccttatcccattccatcttcactacaaccctataaggaggcttgagaaagaagattacattcccaaaggcacatcttggcaagcaggaccttgggcaagtattttaacatctctaaacctcagtgagttcattttcttaaaaagaaaaaatctgttgggcaccactgtaagcccagtgctgtactgggggctgaagataatgcatcaaacaagtcacacagagacagggttcctgccccaggaaatttaaagtccagcagggaagatgggcattcatcaaataataataaaataatcatctcatgaaatgaatgaatgcctgcaacatgcttagaactgcctggcacaaaggacatgctcacaagggcaattattattataattagacataattgtgataagtgctctaaagggagctttgggagcacaaaataggaaatagtagctaatcttgtggtgggtccgtaaggaaaagcttaccagaggaactggcttccaagctaacatgttcatgggtgagcatcaatcaaccattgcaaagtgtgttccaggcaaaggaaacagcaaggacaaaggccaaaggtagaaacgtgatatggcaccattgagaacctataggaagtccagtgagccttgggtgtagattgcagaaggaaataagacaaagggctcatctgggcaggaccttgaaggttgcaggaggagtttggatttatggtctagcactgggaaggtggaaaaggtcttgacgtgctctgacttgtcccagttctcatcctctactctttggctggttaaaagaaaaactttagacaaattaaacttagcagagtctatctgaacaaagaaacaattcatgaattgggcagcacaaggaaccagtaaaggttcagagagctccatccagcaatgtggtcaggcactatttatccacagggaaaggaactgaggtactgaaacagcctgattggttacagctctgtgtttgccttatctgagcatgtctgggcagcttgtagcctgtgactggctgaagcttggctgccctgattgtccaaggttacttgttacaagaatatactctcaagtttgtttacatgttgagttacattacaatttgttatgtagggaggctgctttaggccaaatttaattgaatttaacatgcaccatccatgaaaggccccagaaacaaacccccagtcttgagtttcatcagtgacttcagtgatccagggtttggcccagcccccggttttgcgcagtacagtgacctccttccacattttatcttcaatgaaaattgggaacatgtgtggtgatggcttgaatgtcaatgtcttctctcaattttgctatctgaagtttctttttttttttttgtcttcagacggagtcttcctgtgttgcccaggctggagtgcagtgtcacgatcacagctcactgcaacctctgcctcccaggttcaagtgattctcctgcctcagcctcccgagtacctgaaactacgggcgcatgccaccatgcctggctatttttttttatttttagtagagactgggtttcaccgtgttagccaggatggtgctgatcttctgaccttgtgatatgcccacctcagtttctgaaagtcctgggattacaggcataagccactgcgactggcctgctaatttgttttaagagaggcagagatgtagggaaataaggacagagacagataagtaacaaagataatgagactgagaaacagagttagggacaaagagggaacacatagagatagagatggggagccagtggcagaaagacagagggcaaacctcagacagtatacagagaggaagagagagagacacagagagagagagagtcacgtaaggagaaggaggaggaggaggaataagaggagagagagtaggaaaaggaaggaggaggggagaaaggagggaaaggagagaaacagaataagagataggaaaaagagagagtgacataaaaagagaggaagaaagaatgaacaagacaaataaggtatctttagagggagatgaaaagaaagaatgagagagaaagagattggggagaaatcagattcaaatagatggagataggaagttaagcaagatggaagaaagccaaaaaaaggagaggaaaagaagaaaagctgtgtctgacaggtatagacagagaaaaagacaggagtagggctgccaggggcagaaagaaaggtataacccaagccaaaagggtactgcagccaaagaaattcgaaaggtgtccaaacagacggccccagagatggggagggcgtgatgagagggagataataagcctcaggctgttgtgaaaaatgttaggtcacacaaagagttacagaagaacaggcccagagacctgcctgtttctaagctcatgtcacccaccttctgggtatgccaaagggatgtggacacttttccaaacacctccacatagacacacttgtccaacaacttgacaggcatagggaatgcctgaaaactcacacttgacatggcctttccaaggtttgcagattatgaaacactgaagtgaagggaaaggctccctttgtctctgcctgagctttttccagcaccctttgttcttatttttctcccaatctgtggtttagaatctactgggggttccttgcacctctgagaatcagtggaagccatagaccctccctgtctcatacgcatcagtcccattcacaatttatatacaattgggcttttccccccttgagctcttgaagcctgtggatctcaggctgagactagaagacagcctagagacacagacacagacacatggccagaaacacataccccacacataccccagaaacaaacacaaggcagtaaccaaaccttaagcctccttagcacaagccaagtgctattctaagaatttttacaattgtctcctttaacctcacaagagccctttgagggaggtgccattctccccatatgagaagtgaagaacactaagaatgttgtcataaatgtgctcacactcacacatgtacaggtacacacacacacacacacacacagaaccagaaatgggtcattatactctgtgggtttcaccaaccctttggaactgtaacagaagctagaaactctcttatataaaaatgaacatggcgccgggtgcagtggctcatgcctgtaatcccactttgggaggccaaggcaggtggattatctgaggtcaggagctcgaggctagcctggccaatatgatgataccccatgtctactaaaaatagaagaaattagccaggcgtggtggcaggtgcctgtaatcccagctacttggtaggctgaggcacaagaatcatttgaaccacctgggaggtggaggttgcagtgagccaagatggtgccactgtgctccagtctgggtgacaaagagagactccatctcaaaaaaaaaaaaaaaaaaaaaaaaaaaaaaaaaaagagagagagagaaatgaacgtggcacatccactcaaagatttgcatctggtttcagagcagcttcctaaaagtccaccctgaattgtaggttaaaggccagtcttatgcaaatctgttgcagtggacatttgtgtctgggcttagggacatggcagagcgaagtgtatgcacctgccctgtgcccacactggtgaccttctgtgtccacagggaagcggatttgtcttggtgaaggcatcgcccgtgcggaattgttcctcttcttcaccaccatcctccagaacttctccatggccagccccgtggccccagaagacatcgatctgacaccccaggagtgtggtgtgggcaaaatacccccaacataccagatccgcttcctgccccgctgaaggggctgagggaagggggtcaaaggattccagggtcattcagtgtccccgcctctgtagacaatggctctgactccccgcaacttcctgcctctgagagacctgctacaagccagcttccttcccctccatggcaccagttgtctgaggtcacattgcaagtgagtgcaggagtgagattatcgaaaattataatatacaaaatcatatatatatatatgttcttgttttttgagacagagtctcacactgttgcccaggctggagtgcagtggcgtgatctcggctcactgcaacctccacccccggggatcaagcaactctcctgcctcagcctccctagtagctgggattacaggcatgcactaccacgcttggctaatttttgtatttttagtagagatggggtttcactgtgtaggccaggctggtctcgaactcctgaactcaagtgattcacccaccttagcctcccaaagtgctgggattacaggcgtgagtcaccgtgcccagccatgtatatatataattttaaaaattaagctgaaattcacataacataaaattagctgttttaaagtgtaaaatttagtggcgtgtggttcattcacaaagctgtacaaccaccaccatctagttccaaacattttctttttttctgagatggagtctcactctgtcacccaggttcgagttcagtggtgccatctctgtccactgcaacctccacatcctgggttcaagtgattctcctgcctcagcctctggaggagctggtatcacaggcgtcccccaccacgcctggctaaattttgtatttttaggtggtcttgaactcctgatgtcaggtgattctcctagctccaaatgttttcattatctctcccccaacaaaacccatacctatcaagctgtcactccccataccccattctctttttcatctcggcccctgtcaatctggtttttgtcactatggacttaccaattctgaatatttcccataaacagaatcatacaatatttgattttttttttttttttgaaactaagccttgctctgtctcccaggctggagtgctatggtgcaatttttgttcactgcaacctctgccttccaagatcaagagattctccagtctcagctcccaagtagctgggattacaggcatgtactaccatgcctggctaattttcttgtagttttagtagggacatgttggccaggctggtggtgagctcctggcctcaggtgatccacccacctcagtgttccaaagtgctgatattacaggcataatatgtgatcttttgtgtctggttgctttcatgttgaatgctatttttgaggttcatgcctgttgtagaccacagtcacacactgctgtagtcttccccagtcctcattcccagctgcctcttcctactgcttccgtctatcaaaaagcccccttggcccaggttccctgagctgtgggattctgcactggtgctttggattccctgatatgttccttcaaatctgctgagaattaaataaacatctctaaagcctgacctccccacgtc

SEQ ID NO: 301 - DNA, 41539 bp, Homo sapiens
gagattggctgtaagcaagaaagagccccgcccctagtcttatgactcgcactgaagcgccgattcctggcttttgcaaggctgtggtcggtggtcatcagtgctcttgacccaggtccagcgagccttttccctggtgttgcagctgttgttgtaccgccgccgtcgccgccgtcgccgcctgctctgcggggtcatggtgtgcttccgcctcttcccggttccgggctcagggctcgttctggtctgcctagtcctgggtgagttgtcgggccctcccgattagtctgtccgcctgggcccggggcaccagttcaaagctacaacctgaaagactggtccgagggggagggggttgagaggctcagcagctaacactgggcggcggcggttggcccggggaggcaagcggtgacctagagaaggcctgaccgacggatggcggggaagaagggcccaggagagtaagaaggggccggtaacggggggtggacgccgagggagtaggctgggaggagtgaagcgtggagagggtcagcgtggaaagagtaacttggggaaaacactgaggagtgagcgtaggagggtggtacatgcagattttgggcgccagagacaattaggagagtcttggtttgctgagatcagggaagagttttgaagatggtggaaaaactatggggtgagataggaaattaagagagaagaccatgcctgcctggagtagcttgggagaagtgtgtgggtgggggacagatgggacagataggacagtagagcctgaggggcaggggcagtgacagggttgggcattttgaaggttggaatttgagactgtgaagaaaggatgattcaagagattaggagtgatgctgggtttgagtttggtagtcatagttttaagggcgaaggaacctaaggtagctggggcaatttccaggaaagaaaacttggacccaacctctggagactaaggggttcagggggaactttgatggggagtgcacatctgacttggaggtattgaggatgtcgattttctcccagttttgctacttcctcccagccagacgctgacaaaaaaatccccagacgtttcagttaggagggcctcccagatgtgaggttttgggggtggagtatttgagtttggtagactacctctttgccttcagagtttcttcttttctttcttccccatcacacagctagcctattacctcatattttgggggtgcagggagcaggtagacaaacttgctaaggattgggttgttaccagggcctaagaatggctggatggggccgggcgtggtggctcatgcctgtaatcccagcactttgggaggccgaggtgggtgtatcacctgaggtcaggaattcaagaccagcctggccaacatggtgaaaccccgtctctactaaaaatacaaaaattagccgggcgtcgtggcacatgcctgtaatcccagctgcttgggcggctgaggcaggagaatcgcttgaacccagaaggcggaggttgcagtgagccaagattgcgccattgcactccagcctgggcgacaagagtgaaactctgtctcaaaaaataaaaataaataaatcaataaataaatggctgggtgaatgttcgctgattgtgttgtgccctaataggcagtgggtcgctaacaactttaatgcctaaaagtgaactttgactaaagtgtctcttcctgactttgattcatgctgtgcttgttgctacccacctgctcttgctatttgtgacttaataaaataacataaagaacagacccagatgggagtggggaagaaatagacatattaggggtctgagaaagcagtgagaggtatacattttgtaattcacatttcagtagaatgaaatcaacaccctggaatagtgattctcaaccaggggacatttggcaacatctggagacatttttggttgtaacaactgggggattgcttttagcatctagtgggtagaggccaaggatgctgctaaacatcctaactaagcacagggcagcccctgacaacaaagaatcatctccctgaaaatgtcaatggtgccaacattgataaatcctgctcgaaaaccatagtattggaagggttcttgattatctaattcagtgactctcgaggaccttttcatgcgtctgtgaaatcaaaacttcggaataaggttaagaaggtatttgtccttttctgctgggcacagtggctcacgcctgtaatcccagcactttgggaggctgaggcgggcggatcacctgagatcaggagttcaagaccagcctgaccaacatggtgaaacccagtctctactaaaaatagaaaaattagccggtgtcgtggcacatgcctgtaatcccagctacttgggaggccgaggcaggagaatcgcttgaacccaggaggcggaggttgcggtgagccaagattgcgccactgcattccagcctgggcaacatgagcgaaactctgtctcaaaaaaaaaaaaaaaaaaagaagttatttgtcctttgtccttttcactctcatcctctcaccagtgtacagcagagttttccagtggctacgtaacatgtgatgacctcaccactctgatgttcttatattttattcatttctcagttttaatttctaatactgtaaataccaatacatatgactcacataaacctctgtgaagtcctcagtggataagaaagtaaaggggtcctgacaccaaaactttgggaatccctgatgtagtccaactgttcacagcgcgcaggaaactcttctgtagcacttctgaaaggcggccttgaggcaggctttgcttgaatacttaattggaagccttaactgtaccttggagcacttactgagggccaactgaccctaagaaaggattgtttacaatggaaagtaccttatcagtgactagaacacatctgaccaaggcatctgttaatcagtagttccctgccaattgaatctgtgcacaaatacaacactgttattgttttgggaaagtgaaaaaaataatagttgtcctacttgttggctttcatgtcattaaatttttttttgttttttaatgaaagcttttttgttttgtttttacaaaagcaatgcttactcactgcagaaaataaacatgcaaaaagaagcacataaaagaacccatcagctcatctgctagtttgccatttattgatcaggactaactagattcttcctcttggaaaatttccaagattgattccctccgcctccaagttcagagcaggatttggaaaagtaaatattaataatgtacctagatctgatttttaagaggttccaggatgaaatagaaaccatttttctatacagctgcattttctgatggctcttggttcagtgtggagcccaaagtcctcccatatagctttttctgtcaagaatttagcagttgcttggtgggttttgcacaagttacttttctatatcaaaatggataccaataataggtttttgaaaacttaataaatatttgtaaagtacctaatatgtagctaaatcaataaatatttgtaaagtacctactatgtagctagaactgtgcctgggtactgtacggagtgccaatgaaggaggacctgtcctaaatttatagtcttattagcattagtgctctagctgtgccagtttgactttgtaactttataactctatcccagcttcacccataaccttttaaaaacagcagctttagaataagtacagaaaaggattcttagaggctatatattggtctttttcatagagattaaattatgctggtgtttatttggatgaattgtaactgaccagacaactttccgaagagaagctatatgatttagaggtgttataaagtggatagtgggtgaaaatcctttctttatataattgcctaattatggtccttttgtgatatcatagatttcaggattcttctgtggttattgattcttataactagcttgacttctgttttttggtttgtttgtttgtttttttagggttcagaattttttttttttaggtttgaggcttttctgggtgggaaaaacctcacagaaatattcttagtgtatgttactggtaggagcctctcccttccacacgtttactgaatgcctattgtgtcccagccactatattaggtgaaagggacagaggaatggataagacagatgaggttcctgctctcatggagcttacattttaatgggagaagaaagctcaacagataaataatataatgtcagatagtgataaacactatgaagaggccgggcatggtggctcacgcctgtaatcccagcactttgggaggtcaaggtgggcaaatcacctgaggtcaggagttcgagaccagcctagccaacatggtgaaaccccatctctactaaaaatacaagggcatggtggccagcacctgtagtcccagctactcgggaggctgaggcaggagaattgcttgaatccaggaggtggaagttgcagtgagccgagatcatgccactgtcctccagcctgggggacaagagcaaaactctgtctcaaaacaaaacaaaacaaaaacactatgaagaaaattacacaggtaatgagaaaggagaatgagtagatgataggaatgggtgatggtggatgatccttctttatattatgtggtcagagggccttccgttatcgggtgacatttgggcagagacctgggtgttggcaggaggccagccatgtgaccatctggggaaataggaataaatcttatcatttgcaaaatcttaggttactagcctattttccacgcttttttgtttccccctagttttagtcaagtctctcctatggtagcagtctctaagagcagagacgatcttatgtactgttacttcccattgcctacctagcatagggtctggtacatggttaacccgtagtgaatttttgttgaagatattcattggtgggcactagggatatggtggtaaactagactcatttagtctcctttttcttccatgaattttaaatgatgttttgcaagaagttcttttggattgaaaacttcaagatcagtgctaagcagtacggataattatacagtaatttactaatgtataatcccatataataatgctagtttcttacctgtactccttcagatatacctccgtagtctcgaagggggtaatatggagaattaggagttccttggtgaggagagttaggttttcacaaagttaggttttctctgagagaaaacaagcactaagatttttctataggcttaacacatttcatttaactgataactttgatttcgaggttctgccaaattattctagttataatagagatactgtaaaggactgaaaaattctgaaccctaaaaaaaaacaaaaaaaaaacgaaaaacagaagtcaagctagaagataagaaaggacaggcttgttagtttgttagtcattgattatcacatctgatagggttatagatattcaaatatgtcccaaataccagattagtttgttagtcattgattatcatatctgatagggttatagatattcaaatatgtcccaaatatcagattgtcacatctgatagggttatagatactcaaatatgtcccaaaagaacagctttcttcccctatatctttgggtagattttgtctataaccaagcattatttcgtagcactggagctgatttaaatgacccttgatgcaggaaggctgctcttctttctgtagtgcaaaagtattctgatcataatttcttattaaagtgatcagagatcccctcagacccaaaagtatactttataagtacttgttggtatcctgctgtgcattgtgaaagaattctggaggtgtgccaaacactgctcaacaataagcactttccattagttgagtagtgttgaatcttgtttccttacccactctttggccttaacaaattaagtcattttatagcttaaaaacatatttttattaacttttaatactctttttcatgtgttcaacattcttactttaaaatcatattgcttttctcctttaagaaacttaccaaaagcaagggtataaagtaactgaatgcaatgagtgtacctattattaggaattataaaggagaaacagttaatctgacttaaacttgtaggaaaaccatcactctgaatagaaaacaaagataaataggtaccgtatgcctctgtgtcctgtattttaaaaagaccttttgctcaacatcattctaaattcatgagtttgaggacaagagtccagaatttaatatgatgaaagtaaacataaagctaaaacttgggaaggttccctttaggtgctgtgtttactaaaaaggagacttgtaaattggtatctaacttgtttggcaaatttcttttagctctgaagggtttatatgctttcaaagaacctattggagaaatatgcactataattctaaacaagggtaacttgcccaaagtctcacagctaggaagttggactgccagatttgagttctagctcttccactccaggaatggggactcttaatcacttcattatataatcaatccattgtatcttggatcattgtttggtttctttttattggttttgttttattgctagcattatgttcttcccccacccctaattttgtgtgtttatgttttcagctatactttgggtcaaatagacttgcaaaaacctagccactttttgcagtgtcatacacttggggaagtaaggtctgtgttctctgtgagaggtttttttttttttttttgacagggtcttgttccattcccccagctggagtgcagtggagtgatcttggctcactgcaacctctgcctcatgggctcaagcgatcctcccatgtcagcctcccgagtagttgagaccacaggcatgcaccatcacacccagctattcttttgtatttttagtatagatggggtcttgccatgttgcccaggctggtcttgaactcttgagctcaagtgatctgccccccttggcctcccaaagtgctaggattactggtgtgagccactgcccggtcaaggtctgcattctaaaagaatttacaaatgacctttttggaaaacaggattgagaggatatttgactttgagaacggttgattttgaggcatacctttttcttttatttagagaataaactctcagctctaaaattacacactctagaatatattcatctatggttttttaatgtcataaagccttttaaaaattgggtattgtaaaatcaaacacagcaataaggatggaaattgcttgctagatactttttaataaagtgtaaatatttcaactgtaaacttaccttttgggaaaagctctgttcctagcttgacatccatgtcaaaatttattgaagtgaaacccaacatggggtttgagggaatatccagaagactgatatgttcaagatttggaagagctaaaggactggcctctctgtaattagattaagctatgttttgggtccctattgcagtgtgttttcaccttgatataattaatcagtatttattgaaaatctaatatgcattcagcactacttggaatgataggagatagaggaaaagtaatacacatggtgtcccctaccatgacactcatgatagatgacattcatataaaagacacactgctaggggttgtgggatacatcagatcatctgatcaagggagcatactggagttcaaacgagtgacagaaatgttatctaaagggaatcttgaatctatccatatatatcattcattcacagacttggtactttttttattagtaacaaattacttactgtatactataatttaccatggcacaccagtttgttatgaagtgacagttgaaaactgctgtgttggagcttatgacagtaggagggacaggatttactgctataaaataactgaataattcaggataatgtaaaatatactgaaatgggatgtgcattattactgctccttgagggcttttatagtcagggaaagctttgtggagaaaatggctactgaaaaaacagatagcatatcagcccaggttcttaattgcaaggaagagaaatacaatctgattgattttaagcagaaaagaatttattaaaaagaactgggatataatgcataccctttggccccacagtttcattcctagatatacagccaacatacacgcatacatgtgtttactaatatgtgcaagaatgtttgcagcagtgtttgtaatagaatcacactggaaactaaatgcccattaaaggtagcatagataagtagtttttttgtttgtttgtttttgtttttttttgagacagagtttcattcttgttgcccaggctggtggagtgcattggcatgatcttggctcactgcaacctctgcctcccgggttcaaacgattctcctgtatcagcctcctgagtagctgagattacaggcatgtgccaccatgcccagctaatttttatattttcagtagaggtgggatttggccatggtggccaggctggtctcgaactcctgacctcaagtgatccaccctccttggcctcccaaagtgctgggattacaggcgtgaaccaccccacctggcctgtattcacctgatcatagaaggttatacagcagtgagcacagactgcaattatgcataacatgggtgaatctcacaaaacctaaaattgaggaaagaaagcagacacaaaagagagcatagtgaatgattttatttatatcaagttgaaaaatggataaaattaatctatagtgtcagaaatcaggataatggttacccttgggaagggaatagtaacccttgggaagggaaagggaaataaggagggctttggaagtgtagttgacccttgaacaacacaagtttgaactgtgtgtggatctacttatacatgagtttatttcacctctaccaccctgaagacagcaagaccaacccctcctcttcctcctcctcgttatgattttttttttttgagacggagtctctatctgttgcccaggctggagtgcagtggcgcgatctcagctcactgcaacctctacctcacaggttcaagcgattctcctgcctcagcctcccaagtagctaggattataggtgaccaccaccaagcccagcaaatttttagtggagatggggtttcaccatgttggccaggctggtctcgaactcctgacctcaagtgatccgtctgcctcagcctcccaaagtgctgggattataggtgtgagccaccatgcccagccctccttatgattttcttaacattttcttttctctagctttattttcaaaacacagtatgtaacacatatataacatacaaaatatgtgtgaatcgactgtttatgttgttggtaatgcttccagtcaacagtaggatattagtagttaagttttgggggagtcaaaaataatatgcagattttcaactgtgcagtgggtcaacacctgttaatgttctgtttcttgacacaggtggttttggtttgtgaaattatttgagctgtagacttaatgttacgtgcacttttcccttacatctgttatactgtgcctgtttctgtacatatgttacatatcaaatgtttattaaaggggtatattgggtaactcagaatttctggtgctcctggctatatataccaaatcccagttcaggattcaacaacccagatcatgctgctgaactgcactaccactgccaagtgtgaaattgaagcttgctctgctggccttgttgcctgggagcttgatcctgcttctgttactccacacctgtctccctccctgttccattcctggctccatttgcagccctcctttcaaagtgtggggtggatacctttgttaggcagagcctagcacaagtggtcctccttactgcaagggagtctgggaaagcaagtatccagtgttttcagcttttatagtgggtggtgatttctgccagaaattgtaacaaggggacaaggggtgtttcagatttggggcagccaaaaagcgagcaaaatccatctttgaggtgagcatttaggccaatagaagaaagtagatttcaagtgttaggaacaatagaagcccagggtagaggttgaatagagtatggcatttgagcccagtggaaacaagtttaactggattaaagggtgtgctctgggaaaatagtttgagaaaagttgaaggaataggatgggacaagattaaagattactttgaaagtcaggcagaggaatttaaatttcatatgggaatgttggagccagtaaaagtttttgaacaagaaagtgtcctaaaaggaaatggtacttaaggattattaatctggcagcacttctaggggtatctaggcattttctgtcataatttaggtgtggggtgatagattgggagtagaaataaaagacaaagattgtatttaagagaagatttgaaggaaaaaaatcaataggacttcttgaagagaaagaagtagaggctatttctgaaactgagcttgagtgactgatcccactcttcatttagagctagcaaagctgaggagggacccagtttggaggaagcagaagaatgaattttagtttgggaattgctgagtttgaggtgagagatattgagtaaaagtggtccctgtgcagttagagttggggaccaagaagtggaaagaattgcactcaggcagaaaggctgtgaagggaatggaacagagtgtgccagaaccctcagggtgtttctcagctcttgtttacgggccaccaggtatactatcttgaatttaattttaagtgatacgtttgaaccacaacctctaccttttgtttcataaaacgtcagttctcacaccctaagacacattgatgcaagctatcgatgctattactattttacatggtcttcttcctgttattctaatatatttggaaagaaaatgattaatacatgtgaggcttttcttggtaattttcaatacttttgaatgttttgaatacaaggagaataatatactaaagctagagaccttaaacaagaccgagaaaagactgcatataaaaagcaaacctccagttcattaaaattgtaagttggagctcttggctccatggcagggagccttggatcagtaagtataacagctcccttccgtattgtacttagaaaagaatgatcataaaacctacttaggcctcacaaggtctttttgagccttagccaatgcatttagtcactgtcagtaaccacaagctttagtataatattctggcttgcaaagcagccaggtctccagagcatgacgataggctcttctatacaacttgaaagctgttgctgaggcataccttcttgatattcctcttagcacttttctctagtctatagcaagtctgtacctgtagatgacagtggattgctcagatattattaaagagtatgcaagtatcttaacaggaaacagcttaccctttgggtaatgtgtgatacagtgaagaaaatcccttaaatggttgcccaatatttatgctgctggcatgtttgctgggatattttttctcctctgaattagtattttgagtccttgggctcttcagtttaatagataatgtttctatgtttaagtgtagaagatccaccatgttagctgaaaagttccaaggcttttctgtctctgtaacatttctctgcctaaagaggtagcaggttgaaaatttaggaaataactttgcgtcaaaaaattcatcagcctttctaatcaattcgattttaaagtgaaacagtgatgaactttgcatttatcagaattcatgtttttctcatggatttaacagccctttgcaactctgcttccttggttacatgatagaaagagtatctgatcacatcagaataaaatcgtttgggaagacatccgtgtgtcatagattatgtagcttgcaacaggatttaaagcaaaaagatggtagaatatcggatctatcattatttttgcagtgaatgtttcaccagctggtttgagagaagttttacacccctaccaggcttcctcttacctcatttaccgcaaaaaccacaagtcctaacaggcaaactgtaattgcctaaaacaaaactagtaaggtataaatgcatgtggaaatgattatttgaaggcaaaaggcaaataaatgtcaccagtctgagccatgacctaagcatcctaggtctagtaaccattcttttggtaagggataatgccaacttttttatcaataggattctgttaaaaatacaaagaaaaacagtcagcaggatactgtatctatacacatacatatatgtatatacacatatatgtatatatatgtatgtgtatatatagatataaaatacttttgtttcattttagagctggttgaacttcagtggtgggtagagcttgtttttaatttatataatttttgtagtacaattttaaaatattatttttttaaatgaatccaggagctgtgcggtcttatgcattggaacttaatttgacagattcagaaaatgccacttgcctttatgcaaaatggcagatgaatttcacagtacgctatgaaactacaaataaaacttatgtaagtatatattttaatttttctttgagttttatagtaggaatttaattgactttatcctttagatacacgtatacaaatgaaattccacgttgactgacttaatgctgaaactctgggattttttttaagcatacacactcagaagttattctgtttagtgttagaatgaatatttcttctgattcattggttcttgggagtttttgtaggacttgattaagggcaaatgatctgaagacgactatatggtgttcaggtctaagtatttctgtaaagtgtttaaaatgtactagcaccaaagcttgcccttttaaaaagcagcttcccatctgggcatggtggctcatgcctgtgatcccagcattttggaaggccaaagcaggaggattgcttgaacccagcccgggcaacatggtgagacctcatctctacaaaaaaactttaaaaattagccaggcatggtggcacacacatgtacctccagccactcgctgggccgaggctggaggattgcttgagctcaggaggttgagtctgcagtgagccatgattgtgctactgcactccagcctgggcaacagagcgagactctatctcaaaaaaaaaaaaaatcgcttacttaggttggtacaaaagtaattgccattaaaggaacaaaccacaattacttttgcaccaacctaagtaagcgatttttttttttggcacaaactgcaattacttttgcaccaacctaacactaaaatctccccctttttgacatctcctcttaattcctttgccttcttattttctttttgttaaggtcctcactacttacaacctaattttttaaaaaatcagtttaagaacagcagctcaagccagttttccttttctttttagacatacacgaatttatccagaggagtggtatgtagcagaagaatcagggactggtttacacagcaaaccaggcaaagggcaacctggccatggagaatgtatgatttaggctgaagtggcatgccctacataaatgcttggtgttccttgctgcctgtttgtttctcacccccaaatttctatttcttttagaaaactgtaaccatttcagaccatggcactgtgacatataatggaagcatttgtggggatgatcagaatggtcccaaaatagcagtgcagttcggacctggcttttcctggattgcgaattttaccaaggcagcatctacttattcaattgacagcgtctcattttcctacaacactggtgataacacaacatttcctgatgctgaagataaaggtaaccttaagaatggatttgtgttatgttctcttgctttttattaatgataaaaatgtaaacaattttaaaattgttatgaatgtctgtcttcctaactagcatggaaacttcatgtctttataaccctcccactgaccccatgcatggcacatatgacaccatccaacatactgatgatatttgctgtcattgcttgagtgacttactgtataccaggtattatcctagtatacagtaagtcaccttactatatatatcctagtatacatatatatgtgtatatatatacatatatatgtatatcctagtatatatgtatatatatatatacacatatatcctagtatatatatacacacatatcctagtatatatgtatatatatatcctagtgtgtgtgtatatatatatatatatatcctagtgtgtgtgtgtgtgtatatatatatatatatctcctagtatacagtaacacacctagtgtgttacctgcagcatctcacttaattcttaacagcaaccctgggaagtagatgttgtttcatttttacaggtaaaggaaatgaggcttgataagattaaatgacttttccaaacatcacacagtctggtaagtgggcgagctggtgtttgaagcagtctattgacctgcagaattcatatacttaactattattgatttcattcagtagtgtgcatgaaacaaaggtttgatgaatgagaaaatgctttactaatagctactttattttcaagatcgggggttggggggggtgtctcactatgttgcctaggctggttttgaactcctggattcaagcgatcctcatgcctcacagcctcctgaatagctgggactacaggcatgcaccactgtgcctggctactaatagctattttaaatgtgtaaaagttaagtaacctgagactaggagaaatgcctcttgttcaaatctttttatcatttaggttggattttgattgaaaagtaaatgatgattagttaaaggtgtagtagtccctcattacactcagggggtatcattctaagatctcccgtagatgcctaaaactgcagttactactaaaccctatacaggaaatgctatgttttttttttttttttgatctgataactgacatggctactaagtgactaacggatggatagtgtagacaacgttgatatactggacaaagggatgattcatgttcctggttgtgcagagcgggacagcaagagatttaatcatgctactcagaatggcgtacattttaaaacctatgaattgattacttttggaattctccattgaatattttcagagctcaattgaccatgggtaactgaaaccagggaaagcaaaaaccgtggataaggggagactaaagtcaacatttgctgttattttaagacaatttcaggtcaaaatgaacttgggaagcattggcaattaggccattctagtaattcccagaactgaaatgcgtgttaaaatattttgaagatatagagtgtagagattttattttattttattattttgagctggagtctcgctctgtcgcccaggctggagtgcagtggcctgatctcggcttactgcaacctccgcctcccaggttcaagcaattctcctgcctcagcctcctgagtaactgagattacaggtgcgtgccaccacgcccggctaatctttgtatttttagtagagacagggtttctccatgttggccaggatggtctcgaaatcctgacctcacgatccacccacctcagcctcccaaagtgctgggattacaggcgtgagccaccgcacgtggtcgagattttaattttgttagggatataattctcttctttctccccctgcccgttgagattgagttaatgtggtatttgtagtagcttagctctttgcagatagtgtttcattctgaccccagaaacaggtagatgggctttagttgcctagacctggggattaataactcatttggacttaaggatgtcaaaagatcctattcgaaagaaccagaagtaaataagctcacgtaaaatttgggaggtattgcagaatgagacttggaaatcaaatcctagtgttctttttactaatctcttagtttgagagtataactaaagcaaatggttattggctatcttatcagtttatctttgtgccctgttttgcctttcagagctagtataagatatgcccctcactttcaagtagcctaagaatgagctggggagacaaagctaaatgctattcccgagttacatggaaaaattggaaaacattgagctcagtctgattttgttgttgttgtttgcgtttttgtttgagggagtagagggttcataaatctcttctgacagtgtgaggaaaactttagactccctctcaaaaaagaaaaagtacacagtaaactttgcatatggaacatagtccctgaacccatatgtagatccctgtggttaagagtgcctgatttaggtcgagaatggtagctcatgcctgtaatcccagcactttgggtggccgaggcaggctgatcacttgagccagggagttcaagactagcctgggcaacatattaagactttgtctctacaaaaaaaaaaaaaaaaaaaaagccaggtgtggtggcgtgtgcctgtggtcccagctacctgggtggctagggtggaggatcgcttgagcccaggaggttgaggctccagtgagctgtgatcccaccactacactcagcctgggtgacagagagagagagaccctgtctcaaaaaaaaaagaaaagaaaaagaaaagactggctgatttaaaagtgttcccgtgttcccacaagtggtcctgattaggaggagtgataaaggaaggctcagtgtgtgttagagtagtgagaaagcttggtagagaagtaggacctgagctgaaactcagctaatggtagaatttgagtaagcggaggattttgagcaggatgtttccagcagggggaagcatagcatatgcggcagtaattggagagctgcctgattaaatcaggctgtgtgtgtagcagaaggaaaataaagttggctaaatgaagtgggcctaaattatagggggccttggaagccaaggaaagacatttagcttgatggggcaggcactggggaatcattttaggtttttaaagcaggagaatgatataacaaaagcagagacagtagcttataaagaatattctgcaggattagttgagaagtgaggaggctacaagcagagatgctggcttaagaagctgttatagtaatcaagggctgatgtaataaatgcctggactacaggggcatcagttgttagcagttattaggaggaggtgtttaatctgacatatttggatagaaaaactatggaccctgaaatgttaacacttctctctttccccttttatttaaaacaaagggaggattactttttaaattactaccttctatataataatatttgaaactatttggaatgttaaatggcttcctgaaatggactattaataattgtttttgatatagttcagtgtttcaagaatactaatttatggctgggcgcagtggctcacacctgtaatcccagcactttgggaggctgaggctggtggatcattggaggtcaggagattgagaccagcctggccaacatggtgaaaccctgtctctactaaaaatacaaaaattagccgggtggtagtggtgcgtgcctgtaatcccagctactcaggaggctaaagcaggagaatcgctttaacctgggaggcggaggttgcggtgagccaagattacgccactgcactctagcctgggcaacagagggagacccttccttacccacccccaacaacaacaaaaaaaactaatttaggccaggtgcagtgactcaacgcctgtaatcccaacactttggaaggccaggcagatcgcttgagctcaggagtgtgagactagcctgggcaacatagcgacattctgtctcaaaaaataaaaataaaaaactactaatttatttttaggcatctgataactgaagtaacattgaagctgcttttttcttttttaaatttttttcgtgattaaaatatagaaatgtactggccaggtgtggtggctcgtgcctgtaatcccagcattttgggaggccaaggcaggcagatcacctgaggtcagaagttcgagaccaacatggtgaaaccccatctctactaaaaatacgaaaattagctgggcgtggtggcgtgcacctgtaattccagctacttgggaggttgaggcatgagaatcgtttgaacctaggaggtggaggttgcagtgagctcatatcatgccactgcactccaacctgggcaacagagcaagactccatctcaaaaaaaaattatatatatataagttacgtatataataagggttttttaaaaggctctacatatacatatatatatataaagattatatatctataaagattatatatgtatacagagaataatatagcagacccatatgtacccattatccagaattaataaatgctgtttttttaatgtttgtgttacttttttgattaaaaagataaaacgttgacaatacagttgatatttcctttgtcttcattccccagacccattttccttcttgcctgctaagaggcaaacactttcacaaatttggggtataaccttcctgtctttatgtttgtcttttactatataagtacgtgttcataaacaatacatagtttaaaaaaagctattcatagtataactccaatatgcctgcaagttgtttttttgctgatttgcttttgaagtccatctatatacagccagtcacgtatctattcatttttgttaacggtgagaagcaattctgggaaaaatgttctagttcattggttttttgttttgttttgttttttaattcctatggccattagggggtgccaaggcagcattatatggctgcttgctacatgatggagaggcacagaaggcagcctatattaaggaccttggatactttcctttcttgctacttctccaaaagaagccaaaccacttgggtgatcatcgtcttttgaagtttcactatacacaggctaataaaaactatatgaaatggctgtaacttactgctttcatactctgaagattccctgaaatggaatcatctttaaatgtaatccaggaagcggttctataagctcattggagttaatataacttacttgggactagtaaaacaaaaataaggatttactatacaaatgtatgattaatccatctctcttgcttctttagttatagtcactaagtcctgatgattctaccatagataagtgttttcagtttggcttctttgctctctttctactgccccacaccatcttagtttaggcaaccctcccttacccttcaccttaaccagaccatcaccctctggtttccctcttaagtggcttccctgaaaagtttttccccctgcttatcccctacaaatttgctatcttccttaaaataaattatatatgtgttattttctgctttaaaaactgaggctagccctcgactgctaaaaagaaaagcccaaacaggccttagatcatagaagatgcttcaaagtatgatcacctgcaacttgtctttccttcttaacccccatttcttttccttttttctttctttttctttttttcttgagacagagttttgctcttgtcatccaggctgtagtgcagtgggcgatcttggctcactgcaacctccgcctcccgggttcaagcaattctcctgccttagcctcccaagtaactgggattacaggcacctgccaccatgcccagctaattattatctttttagtagagacgaggtttcaccatgttggtcaggctggtctcaaactcctgacctcaggtgatccacccacctcggcctcccaaagtgctgggattacaggcatgggccactgtgcccagcccctaacccccatttcttcttcccccttactccttatgttttagccacagtgaactagtcatgcccttaagcatgctatatcctttgtcactttgtgcctggggtagggcaggcagagagaagaagaaagcctatacaaatatatttatattatcacttttctcctaccttcttggaaatagccattgttaatcttgttttataggaattcttactgttgatgaacttttggccatcagaattccattgaatgacctttttagatgcaatagtttatcaactttggaaaagaatgatgttgtccaacactactgggatgttcttgtacaagcttttgtccaaaatggcacagtgagcacaaatggtgagtaaagtatatatttctctacttggatcctaatttaagagtagagtataccaggtagctttcattgaagtcattatctgaaagcatttatatattaaggtttattcatagcttctactaggctataaagtttttgtaaataatagcaattcttatttttgtgtatcttacaatttaaagtttttgatgtacatgttgtggaatggtattttaaaagacactacctatactgttctcagctgataaaacctaatcattgtttgaacagatcctcagatagcttgattatcagcttttttagcggttccaagaccaaagcttagaaatcagattcatattctaatcttgaatttttaaagttgattttataatttttatatagctttatggaaaggtaataatttctcattcaccagttctggaaaactatgaacacttcccaagaagaggttgaaatgcctatgatttgccatagggctaatgcaaataaatggttcatttgtatttaagtcctttgatgatttctaagcttttttctagtaaacagtatccttccttatggtgattgtatgtgggaataaagaaccaaaaaatttaagacttaactctctgaatttcgtatcagaggcaggcaaagttctttgggaataaaaagatttaagggtctgaaaaagacgagtatgtggccatgtgggagcagataaagcatagggatgtgtcctgagtttgctgtgtcataactcatgtagatattctgtatatgaagcagcagtttaagaacctctgcctaatttagtttcaaatatactaacaagatattctcttcccctaatataacccttttggacttctattatgagaattttttttggttttccctggccttatgaattaagaaaatgtccgctttggtttcttttgtcccttttcgcttgttttagagttcctgtgtgataaagacaaaacttcaacagtggcacccaccatacacaccactgtgccatctcctactacaacacctactccaaaggaaaaaccagaagctggaacctattcagttaataatggcaatgatacttgtctgctggctaccatggggctgcagctgaacatcactcaggataaggtataggtgtctatctttatcaatacatcctttttgcatttcatttcaaatattgcgtatcctaccttcagcccaaaggtagtgttactagaatgattccgttttctttttgtttgtttgtttgtttttttgagatggagtcacgctctgtcccccaggctggagtgcagtggtgcgatctcagctcactgcaaactccgcctcccgggttcacgccattctcctgcctcagcctcccgagttgctgggactacaggcgcctgccaccatgcccggctaattttttgtatttttttagtagagatagggttttaccgtgttagccaggacggtctcgatctcctgaccttgtgctccgcccgtctcggcctcccaaagtgctgggattacaggcgtgagccaccacacccaggtttttctttcttttttttctgagatggagtgtcacactgtcgcccaggctggagtgcagtggcatgatcttggctcactgcaacctccgcctccagggtttaagtgattcttctgcctcagcctcccgagtagctggggttacaggcgtgcactgccatgcacaactaatttttttgtatttttagtagaaatgggtttttaccatcttggccaggctggtcttgaactcctgacctcaagtgatccacccgcctcagcctctcaaagtgctggaattacaggcgtgagccaccgcgcccagcctgattcagttttaaatggagatttcatgttggcttgttgagctttgattagttaggagttactataaccatgatgtgttaatgtcactttcaggtgttgtgttggccggcagaaaacctagcagtttaaagtactcttgggggtttagattctatttgccatcagtggatcagagtacaaacaattggcctttatttcagtcagtttaaaatataactccttcacactttgatctgaaatgcactgtaggttggcgtacaggagtggcacagctatccgtttctccagctatttgattactcggatcgtgtagacatgcccgagtacatgatggcacttctagttgcaatgttccactcaggctgtagagggattgccaagaaacaaatccgatttccaggatcttgtgacttaaacaagcgaggcagatggctcttgtgctccataaaaatgtgtgttttcatttggctcattactgtagaagcttccctcttgtttttttttttaagttgtctgagtcatagcttgaggacccatgccaactttgtttgaaagtgaagacaccatgaattttaagtatccagacaaaagattttttgttctacgctgaagttgattttgtttggtagagtgtaaggctttgctggccacttttatagctaacctgtaccttttccctttcttcttctcctgaaggttgcttcagttattaacatcaaccccaatacaactcactccacaggcagctgccgttctcacactgctctacttagactcaatagcagcaccattaagtatctagactttgtctttgctgtggtgagtaacagattttttaaagttaggttcattctcttagaaacacatctgaaagtctaaatagttgcatggggggaggggggtatttagctttattttccagttctacagtactcaattataaagtgtagtccattcatccctgttcatccctcagagtctgtgcaatggtctgtggactggactcttgcattaatgttcaccaagagtggccattttaccattagagagactctagggtagaagcaagaattaactcacatcaaaaaaaagaaaaaaacgaaacccacaattgtctaatctatccatacataagtaatttccatgataattttttctctgttattggttaggtagtgctcatgtttttctgtgatactatttgaagccatttggaggctatattatttgtgatagtgtcagtaataaaaataggtaacatctattgagtacttactatgtacaaagctctgtgttaagtgtgtatatgaattcattaaatcaggacaatttataatggcagcattcaggtttttgttgttgatcaagagctgaaacctaaacagaaggttttgggttaagcatacctgttctacttcttgctagcataaattaatcatcggggatctttatttccaccttctcagaagcaactattattcccataatttctgtgaagggatgtatgtgtgaacatgttgtggcaaatgagactggtggaatagaagatagctgtaagtgagggaaaatgttgaaccaccaactattctcaaactaaaaatattgtataattagataaaaaccagttctgtttttaaatcagattactgtgtttggggatggggaaataatctcaacatctgatatataaaaagtaggtatgttgttatttcatatgtgatcttggtattttgagtctaaagcacatttttctctttagaatatatgccgagtaattgaggattacattaggcacttgtattttggaaaggtttacaaaaatgttcctttttccagcattcaaataattcctctgttaaagtaccatgtgaccagtgaattactattgaaaatgtctaattgaatttgtcctctccagtatggtaaaagcaagcctcaggcacattctcttttaaagttacctaataggggttatggtcaataagaacaaggaaagtagtattttgggtttattccctttcaagtgattgagtttgatctttctagctgtggtagactcctaaaaggaacatgatttctcttgactcttatacggcaatgtttagtatttaagaattacaatatttaatttacccagcaggctatcttaaaacgtaatccaaaatagtgacattttaatcatgctacaggcactctgaaaaatcaagagacacctgcaatgtccccagagttcagtggggcccatttttgccttcaaccctgtcatgatagatgctccttaggagaatttatagaattcgagtgcgttatgtgcaggctgctatggtgggttatggagaagaaagccagtattcttaaagtgcccacagtttagtggtaatgggagaaatctgcaaataattaccatttttgtgaaaggcctacatgccatgccaaggcttttgaactcgattctgtaggcagtatagtactgtggaaggtgtatatgaaatgggatgagtgccagaccagagaatagtacaaagtgctgcaggagaatggaggagggagaggttaattccggctggaggagagtcaggaaggtttaatggcagagatggcatttgagctgggccttcaaggatgggtctgatttgtattggtagggagataaggagagtaagtgggaaagtgcaggttatccctggataaagggcataatcaagaccagctgggagaatgaggagtgttatatgtttagtgaaaatgtggaaaagtcattgggacaaattgtggagtcttgaatgcaaagccaagatgtagcctaagtcgaggagggatgtgatgaaggtgtgaagtcctccattatgcttcttcctgaaatttctctgaagtctgtctcctagcttttactccccattgcctttgctctgggtccagtccacattacctcttgcctggaccattcaaacagctcctgcctgattgctcctcttcctcaccttctccattgttctacatcaacttaaccttcctaaagcacatctctccatcagtgtttctctctttcttttctttctttctttcttttcttttttcttttcttttctttccttccttccttccttccttctttcttcttttccttcttttcttttctttctttgacagagtctcgctttgtcgcccaggctggagtgcagtagcgagacctcagctcactacaacctccgcctcccagattcaagcgattctcctgcctcagctgcccaaatagctggaactacaggcatgtgccaccacgcctggctaattttttgtatttttaatagagacgggatttcaccgtgttagccaggatggtctcgatctcctgacctcatggtctgcctgcctcacaatgtttctcttttgccaacaaggtaacatctaaagtccatggctgggtagttcaagccttcttttctcccatgcaatgcagcctgcattttcagccttcactccctctttatgaaccttatgtttcctttagttccttcagggtgcttccctcatcctgtcctctgtgcacttcttgtgaggtaggagaacatagtaataataattacatagactccgcagccatactcccaaaatggggatgataacagcacctattgcataggagtgttgtacttactcagcgaagcatcatatgtaaagttttaagaacagtgctgggcacttagtaagtgctcaaatgctagcataaaaatttgagattatgcttattttctaactaccgttatttatactcttgctctctcaaataccccttttcccacttgtttcctaagagaatcctgcccggttcaaaatgccccatccctaagctggcattactttttctcctcccttatttggaagtgatttctctcctattttcatgacttctcactttcttttttgtaatatggttgtttatgtgtttatcttaccttccctggcagattgcaaacagggtgaaggcaggattgaagtgtggttcattttggtagctcctggagtacttgcactctgaaattattagaatgactggctgatcagatgagtacttcagaaagataatagcagtgaaaaggaaagattaggactggaggggctgaaaggcagggagcccacttaagaggctgctgtgatccaggctagaggtggtgagggctcagcaagtgacaggaggaataaaattgaggccataaatcttcaagtgtctgagatccacatgactacacctgtgctccaaaagttggaaacaaaatacagaggaaagggatttctgtcagattatgagttctcttttacttagttgcagtttattctaccgcatgatttcttcttctgtgtaatagtgttagattgcttttcttctgtgggtattaaccgtatctgttatctgtagacagttgtgaaatgttaattaactggaagctctttttcaaacagaaaaatgaaaaccgattttatctgaaggaagtgaacatcagcatgtatttggttaatggctccggtaagcaaagcactggcctggggaaaaagactgtggattaccctgaaggattagaaattacaatggtcttattaccaaatagtgccttatttaatgaaacagaagatgctatgtaaaaagtgtaccttgatcataccttaaaatcagtaacttagaactatgatgttctgtctttttctgtatcccattttttcaaagtagagtagataataattaaggatatgactgatttttagactatagaaacatctatagaaagataagggaacctagttatggtaagaattgctttttgtgggttgatcttgtcccccaggccttcactgaaaaaccctgaggactgttcctttttttttttttttttttttttgagacagggtctcgctctatgcccaggccagattgcaggggtgtgaccacagctcaatcccaggttcaagccaactacccacctcagcctcctaggtagctgggactacaggtgtgcaccatcatgcccagctaatttttttttgtattttttgtagagacagggtttcaccatgttgcccaggctggtcttgatctcctgggctcacgtgatctgcccaccttggcttcccaaagtgctggaattacaggcgtgagccactgtgcctggccaactttcccatttttgatgttgataggataagaagttactaacctgtttcttttctttgaagttttcagcattgcaaataacaatctcagctactgggatgcccccctgggaagttcttatatgtgcaacaaagagcagactgtttcagtgtctggagcatttcagataaatacctttgatctaagggttcagcctttcaatgtgacacaaggaaagtattctacaggtaagaatcaagcaaacttcattaataatttatgttcttatgttgacaggtggcttttcctttgaatcatagacatttaaacgttgaaatagaggaatatgaattcatagccttgaccaaattgtgcaactctatatttggctcatcattttgctcaaccgagatgtttttgtgatcttaaaatcatttgcaaaaaaagttcttaaagctaaaactgatagaagctttaagtgagctttatttgaggtatgggttttagtttgtagggaagatggcacttgggagcagcagctttgagcatcttgcatctgcttcctgaggccgtcttctcactggaaacattttcatacctgaatgaaagcagtttggtctgattttgttaagacaaaagataaagagcggtagcaaagcctcaaatatcatgaactatgtttttaccagccaaaacgatctggagagttttcaaagcatgtgccagtgtgaatgacgctttttgaagatcactcagggataatggtggtatttattagatttttaatgaaaccttttgaagggctcattataatgtgttcatacgaatatgaaagacatatttggcattacaagattaaaatttgcatgaagaaaaaaagcacataaaattccttaattgacttgtccttttaagcctattacctaaaattgggggtttgtggatcacaactctgttgagcagagctagctattccaggcatccacatccttttcaaccattaattctatggtttggaaggaaatgtggaagctgtgtttaaaagcgaatatactgtgagccattcgactacttttgcagtggtgttgaatacctagtctgacttggttaggccacaataaattgggctctccaccctaccattcttgcgattaaagacgttagttacactttaaaaatattttcaagaattcattttcccttttgtctgttttgcttatgtacttcaattattttgatcctttagtagctttatttttggactttttatctggctccccttcattattcccctaattttaagtccagatttgtgtttacagtttaaaatcgtttgcagtattagtatcatcacttcaagactgtttatctagtcacctgtaatagagatgagctgtgctctttctcttactttgaaactttggtttttatgtacatagaattaaaaatatcacccaaagagatatacagcatttaatactgatattgaatgtataatctatttgtggaactaggttcttggctgtgggtacctataaatacaacacataggtaatatttgactgtatggggaaagaaatagaattgcaataaggcagaagagtgttgattggattttactggatcagaccactttctagaagtagaaaaaaatagcccccttaggctgccaaccctgaccagataagaaatgcagtaagcacgctcaaattagtaagaggtcccagttttcttgactttgcagccactaaaattgtatgtactaagtcacgatctgcaaactttaaagttccaaacagtgagtgttttaggctttggtgccatatggtctctgtcacaactatttgaccctgctattgtagcacgaaaacagcaacacataaacagatgactgtggctgggttccaataaaaccttatttatggacactggaatttgaattttatatgctctcatgtgtcacaaaatatttttttcaaccatttaaaaatgtaaaggccatttttagctcttggaccagatctggcccatgggctacagcttgctgacccctgaccctaaagacagagccagcctggctattctcatcacatgataccttcctgatcctgtttccactttcccaaaagacattcactctaccactgagaggctaatctggctatgtaaaagtgggctagattagctccctttatttctgataaagtaatatgcctattttggaaaggacttggaatataaacaaacatatatgtgtgtatgtatatgtatatgcacacatatatatcacatataaaatatatatcatatatataatgtgtgcattatatatcatatataatgtgcatatattatatatatgcacacatatacaatgtgcatataatatatgcacattacaatatgagctgtgtttatagatgtaaatgaatatacatgtattcatatatatgaatatctgcatatatacacataaacaaatgaaaggacaaagaaagtcttagaattttaattctagaacagttctccattttctatagctttatcataaaaatatacctgtcttagttacttgaagttgatcttgtaagaacatttctgacttttaaatcaacatctttgacttcgagacattcttttgtgattatactcattatttattacacactttttctcacctacagcccaagagtgttcgctggatgatgacaccattctaatcccaattatagttggtgctggtctttcaggcttgattatcgttatagtgattgcttacgtaattggcagaagaaaaagttatgctggatatcagactctgtaacactaatcaatacgtgatctctgttacaaaagaaaaaagcaagtacaagttccaacatgcaatactggtcaacttaaggtatatttagttgcagtccagctctttagaatgggtggtatgggggatttcaaacttaaacaaaaaactatcaactacaaattagttgcctgactttggtttttccaaccaaggaatttaaaactgttatttttacagcaaaagatgtgcaaaatcactggattataagttctattttactgtcttgaattagtatttcagtgttttcattttagacattcagactaaaaatacaccgtttagaaaaaacaatttttgaaaaagagattttttttccctgcaggtagttgagttggaacaacatgttctaccgtggatttgtacttgctccttttgctctttttgtgtgtgtgtgtgtgtgtgtgtgtgtgtgtgtgtgtgtgatttttgtttgcaggttaacttagctactttggcattgctgcatatttgacctttgagagatataatagtagatttgaacaggggctggtattattatgttcttagcaataaatgcttttctaatgccttttgaatacatttgtatttatgtggctgtaatgacaaaagatacaaaagctttttaaaatttagagtaggtattaatcttattgtttaatcttttttttaaaaaaactggatatttcaatcttttaaattgcaatatataagactattccaactgggcatttcaatccattttttaggtgctttagagataattgcttgccagtgccaattgagggcattagtactttgtgctcataaattggcctctgtatgcagtactaaaattaatgcagatttctctttagccttccaacatttcttgttgatagtgatgtattttattattttctttttcttaagaaatgccagtgtgtcctagaacctagataacgaagtgcacttacacttataaaataacttgcatctaggctgggcgtggcggctcacgcctgtaatcccagcactttgggaggccgaagtgggtggatcacttgaggccaggagtttgagaccagcctggccaacatggtgaaaccccatctctatcagaaatacaaaaaattagctgggcgtggtggtgggcgcctgtaatcccagttactcgggaggctgaggcaggagaatcacttgaacccgggaggcagaggttgcggtgagccaagagcgcaccattgcactccagcctgggcgacaaaaacgaaactccatctcaaaacaaaacaaaacaaaacaaacaaacaaacaaaacttgcatctaaccaaaaagtcttggttttatcttaatccattaaaaagttgttctttgtttccagcttgcattgattgctacaacatcactaatttggctttcacatttaaatggttctgtgctaatcaaaactttcgttgttattattcattatggtagaatcatttttaattcacgtgctttgtgttcagttttgtggtctgagagatgtaccaattgtcaaattaccgtgtaccacctaatgtttataggagaaagcaaaatacatcagcttggtagttaacacatcaaatatttcttgctgcttctaggagaacttttttggtgtgtgttggaatggctgagcaaatattaaaattgttaatatgcagccatatatggaaggttcctgtggggttgttttttcgtgttttttttttttttgtggtgggattatgtgcctcccattcactagaaaatgagaaaattgtctgggttccaaaatattgacattgaatggatcaatacacacacacagacatatatatatatatgcacacatatataggcagttgcatgctagcatgggtatttttataacaatataactgagttatattggaattataaatattttccgtcacttaaatttgttctttgtttagcctgaaaacctttatggctcaagatcagattcctgactaacccctctcttagagctacagcgagctgcattaccagcttaaaacacttcttagggattaaatatagatgtaatttttcaaaatcgtttttaatttaaactgtgttttagtgtaaaattgttaaccttgtaagatggataatgtgtataagaatgtaggccttaactatttcacatgagtcaaaacaaagcagctttaaaaaaataattggaagcacaagtgcatggcactgactgaatgctgttaatatttctaaaagtttctacattcagattatatgcctgattcatagtaaaatacctctaataaacactgttttatagaaaacctgacttcagtgaatatttttgtattttacatgggccagtttatatactgctatttacactattatttcctatagctacatgttctttgtaccttttgtagttttatttgtattactagattcataccttgatggtaacgctctatctggttttgggtgtttttcatgttttagcatttgtataaagaaactggtccatgtaaatactttccatgttttttcttcaaatgtttaaaccactagttgatgtatggtatctttagatatttgcctgtctgtttgctcaaaattgcttctaaaacaataaagattcttttatttcttaaggcaatttgcttaccttttttcccgttggttaaagtcaagattttgtatactacataatggcaatttctttcaaatggaaaaactttagaaatgtttagaagtagaactgaattatttgcaaaatgttctgatgttctgtctgtatattaccatctggaagaatagtcccatacataggcctcgattgatgctaggcaggctacagaataagatcaacctgggaagcgttttataaaaatagattccaggctgcatccttagaggatttaacgtagtaggtctaatgaggagacagagagagagagagacagagagagagagagagagtgtgtgtgtgtgtgtgtgtgtgtgtgtgtgtgtgtgtgtgtaagctcccctgctgaacctgatgcatagtcagttagggaaccagtgatctagaatatttatttcataataaaagctgcggagtatctctttgtacacttttctcaattcctaagttgaggttgatattcaatatctctacatagtagctttacattgcagccatacatattgagctattgatctgaaccaacgtaggattgtgtgcagtctctctcttacttagatcactctaaaatacttgagccttccagtttccatatacggatagttacctagtcaccttactatatcacataagaaaacttagcaatgtagctggtaacttttctctgaattacccagttaagccatgtgaatgccagttagtcatcacggctgcaaactctgcagttaactaccattgtctttggccaagttgtttaacttctagtgtctcaatttcttcatccagtgggtgggggctttaaaatcctgctactcatttctttgagtgataatttgcatttcagaggaatgcatcatagtatttcatacatcttagtattttagaaggaatctgataagctacttgttacgtatcaagaacatactataagttcagtgtaaaatgtaccacttaagtttcctgcagtttttcaggaggaattcttataagacttggacatttttaagatgatagtatttcatctgtttatttaggtagataatgttaaattgtcttgggctcatcttccacccatctccttttcttttaccctggtagctaactttctgcgttaataatcaccatttcttgtatttgaaactggtatagatattcatgaatgatattgagtagcttcacgaatcttttcagatgcatgtgatttacttaacacagtttgattatagatataaaatgtatataacaaaatatcacctaagaatgtgcttcttaatgtggatccttccaaaaagaagttttgactcgtttgtttgtttgttttgttttgtttgagatggagtctcgctctgttgcccaggcttgggtgtgtatagtggtgtgatctcagctcactgcaacctccgcctcccaggttcaagcaattcttatgcctcagcctcccaagtagctgggattacagacgagtgccaccacacctggctacctttttatttttttagtagagatggggttttgccatgttggccaggctggtctcgaattcctgacctcaagtgatctgcctacctcgacctcctgaactgctgttattataggcatgaaacgctgtgcctggcctcaactggtttttaagagaagttttattagtttttgttgtaaatgtatacctcagctttccagttcttgtgttgaaaattgtgtttgaaaaatgtctgaactggcagaaaattgaagattaacagcatttttaatctacatgaaacttcttactgaaattttagtggccatggaactttttaatctttaaaaatctttattgcttctgtggctattaaattcttctgcaaatacacttctcttttccccagaagcattttcaatacagcgttaagtatacattaggcaagtagatcagatcaaaatgacttataggatgagattttcttttcttcagaatgtgatcccattaaagttactgttttaccaacattttttccattaactaaataatttttaaaggttgaattcatacaatcaatagttattataaattaatatttcacatactaattgagagcattttaagtaaatgacagtatctagaaagatctttgtattagcggaattgcctttttgagctactctgagaatatttgtcttacatgaaagccttattggcagtatttatgaaagtcgtttcagtactaggtcaaatacccaatttgggaaagagagaactatgagtctgttgccagaataagaaattaatctactaatgaatttttaaaaaaccaagttatattaaacccacggcataatactttatggtacatgtcacctaatagtttatgggctgggtggtaatttgggaaattgtaggggaggtgctaactggggattcttaacaccatctattcacaggtcacatctggcagcctcagctctctggattcttaacagaaccaagaagcaagtaaaacaaataattgaactggcagcccaagtcaatgtcagaaaagtttataaactccagggttgcattttgttcctagttattgccccagaggctagtgggggcggcggggaaagcttggcacatttcttgaatgcaagcacaatcagaattgccatgcagcctatttgtcctatctttgatacaattctaataagcttagttatctgatttatcagtccctggtagactgcaagctaggcagagaactagggcaacaagacacaggaaatgggaaatagaaatagcagttaacttctttcctgcaagtgtatccatctgtagcattccttcctcctctccagtctcagagtaggttttcttttcctggttaaactgaggcaaacagttatgtcatcaaggcccatttatatctcttttcccattactaagtgaccccagattgttatgtattgagttcttaatgtcttacgcttttggaattcaatctcttaacttgtaggagaacttgtaccattcagcatcttctgtcaattgctaatggctgtttccctcatcctatttaagttcttctaaccttaagctatcctttcttgtccctatgtcccccttctaattacctcccttttgtcctgccttaatcattctaaacttctcaaaatgagtattgtatttgttaccctgcccaagttcttgatgtcctaaccaatcacttcccattccctcttaaacctgcagcaattttactcatatctcccacccttcatattgctagaggcaatggacatgtttcaaagctttctactattatttgctgtctttccaccttaattgaaacgttccatccttagcttctctggcgccattttctatctgcccttttacatctttttcctactccattgtctatcccacaggtattggtgttcccaagggtttttgtctctgatcctctttttattctacttccccttactgagaaatgttcttgcccatgttttaactaccacttaggttcatatagccacttggttaggacatagtgattttttttttttttttgagatgggttctcgatatgctgcccaggctggtcttgaactcctgggctcaaacagttctcccatctcagcttcccaagtagctaggactacaggcgtaagctaccatgctcaactaaggacacagatatcttaaactcacatatctaaaactgagcatctctctcttccacgtatcctttttaccacctgttccatataactacaaaaaactgaaatgcatatattcttcctcttttatagaatggcaccagcatctacataatcagtcaagtgtggaattggaaaccattctattatctcctcctcgtacaccccctacatccgtttggtcaattttgccttctaatttgatctccagtctgtgccttctgcttttcttctgcacttcattaatccagctcaggacaatattattggttacctggactctagtgataaagatatgtcctaccttactacctccatctgccataacttctgaaatgaaatcctgcttaatatcctgctgctgaatttttttttcatcaggataaggccagactacctaagagcatatagtacctttgtgacctgggtccctgcacactttttctgccttctatccagccaaaaataccttttgatccattgttctagctctgccaacctgcttgcgtttcccttgaagtgctatgtctttttactctccatatttttgtctgtgctatttcttatacctggaatgcccttcccccattacttgcatcattaattcctattcattcttaaaatctcagctcaagtgtcaccttttcaaagtgtgtcttatgtaataaggctgaacttgagtgtgcctctgaaatttttccatggcactttgtgttgcctactcctaccacaacacattttgaaattataaccactgatttttcttgtctgactctaacactagactgagcatcttgaggcaaacagttatgtcatcagggcccacttatatctcttatatctcttttcccattagtaaatgatcccagattgtaatgtattgagttcttatgtctgctttgtatagttgttcattcagtgagttaatacttaacagcaatatttgaagcattgtgcttcttcgacatcataacagtttgcctctgaaagctcacggcctgatcatcaaggcaaggctaattagatttgttcattatgttctgtttaagaaatctgggaactatgtgaccatgttatacatttttcatccaaaatgactgcatttttacttggtacttaaaagtgtattatttggttatttggaaaatcacttttgtggaacatctcatttgctgataatgaaatgccaatgacttgttaccttggtataaaaaaccaaaatatgcgtgttaggaagtgctgtcattttactcaaaatacacagatttgaaagtttgtcactgtttctgttctcaattgtcctttctccacatctagctcaagactgcagtgcagatgacgacaacttccttgtgcccatagcggtgggagctgccttggcaggagtacttattctagtgttgctggcttattttattggtctcaagcaccatcatgctggatatgagcaattttagaatctgcaacctgattgattatataaaaatacatgcaaataacaagattttcttacctctcagttgttgaaacactttgcttcttaaaattgatatgttgaaactttaattcttttatcaatcccagcattttgagatcagtctttattaataaaacctgttctctttaatcagcttaaaatccaaagtgtcatatttactggtcctggagacaaacttgttcaaaagaacatcaacgtgcaatgttttaaggtctatcttaagaagccctggccaaattttgatcctaaccttgaagtatgccttgaacttattaacatggccattataagaataaaatatgtagttgtgtcttaatggaattaataaatgtcatttcactactggtgttctgtttcaatgtataaggactatagtgatttaaactcatcaatgtgcctttgcataaagttcattaaataaatattgatgtggtataaatgcccatcagatatgcttaaacttggttttcagttgaatgaagtagagaatgtcctcaggaccatcagcattttaaaggttatgtgacttttgctgatttctctgagttcaagttaagcatgaagttagtacctcaagcctgtgatttttccctagggatgatacagacccaagaggctacaacagaacttaaactggcttcgtaattagagtttttaagataattgtttgtttttcagcaatatagactgaaaagatccaagcatatttagccacttgcttttttgtttcttgttttgttcttctttggatgcctgattagtattgaaagatagaaatattctatgaactaattaggacagattgtgttgtgtttctctacctcatcttgttgatctctggagcattaaaatctatttagtgttgtcatcagtgtggtacttatgaaatgtaagctaacagcaatctcagaagggaggcagtgaagcatagcaactaggctcttgtttcttcaagatggcccctgtggggcagtgcatagatgggggtgtaaagagaagctgttggcattaaaatgagctagataatcagcccttgttgaagcatattccatggtataagagtagcacagacatgaaacatagataaagaaggaaggcttaatagactagaagacttccacattgaagtattattaacccattgtatgtatataggggcatgatcagagtctctataacttcctgattaacaatacagtgtatcttgttacccagctgtcagtctttgagagctttcagtaaaatatagtaaattctttcagcataggctaatgtgtggttactgagatgagtgttgtgtactcagaaccgtagcaacatttttatgaatggtaaaagtacaagaggaggaaaagttaaaattagaagaaaagtacaagttattgcttaatcataaatcacaccagataacacattttgttaatttcattagctattactggaaaggaccttaacgattatttacagaaaggggagtgaaattcattgaggttccatatcaagtgggcaacaaaactattactagcattttgataaaaattgcccctaatgaaatctagtcactcaacagtaaaacaacagctggtttacacttgaaattatgagatcagaattgggcactttgggcttccgtactatgttttgcttaagttttttttttaatactaatatgggctttttcagtagtaatataccaaaacacttctattttaatctctgtttgctacttcaaaacctaatcctcctcagatgggatcatgagcataagaggaaaagagaagagaatgaatacttgttgacctcttgatgtgtatcagatgctttagaaatgtaattgtatttaatcctcaaataccttataggtattattatccccttcttacagatgaggaaagtgaggcccagtttaaataacttgcccaaggtcctttggctagtactggaaggagtcaagatttaaacacagttctgtctgaatccagaactcaaaatctacattgcacatgttgctttcctggtggttcggtggaatggactgcaacgcattagatactgctgttattcttccaggccaccgctcagctaaaaataattgtgtgtgtgtgtatatatatatatatgtacacacacacacatatatatacacacacacatatatatacacatatacatatatatacacatatatatacacacacatatatatgtatatatatactacattcttgatcctaagtcttttttaacttaaattttattacttatacagaattcttatttatactttaattataggtgtgacgaagagaaagagagtagggaaatacacaggcagtggttttaagtgtagatgatggctccttaacccagtgtcattagataatcaaacctaaagtcttcccatattaggcaagcgcaattctctattttggacccttcccattcttcccttaccttctgcttttcgtactgaggaatttcgtgtgattttagataaagtgataatgagatattgagcaaataagaaaatagaggtaatgctataaaaaactaagctatgtacactttcaaaatgcatgtttcttgcatgctttttactacttaattgcattctttgctaatttcctttccttgctgtctgttcttttctaacagctgaagaatgttctgctgactctgacctcaactttcttattcctgttgcagtgggtgtggccttgggcttccttataattgttgtctttatctcttatatgattggaagaaggaaaagtcgtactggttatcagtctgtgtaatcagttaaatctagtgtttgtttgtttttttcaattagaagttacgtttccattggctaaaagccaggacatgctgtgcaatagattgtttaagatatgcagactaacttcagtgagttcctagctaacttgggcatgagtacacttatttaagacaaaatatattaggaccaatttttttctgttttttttcttcctttgttaaagtataattaaaagaaaaattgtggcttagaattttttaagtaaataatgattttaagcccctggatccaattatgaaagcatttttgctgatgtgtaattttatatgttacagttacttatattttactactttgatgttatttgcaaaatcaaaggtgttaaagaatttaacttgcttcaggaaataaattcaagaacatagtggattcattttcattggtggcagacacgaaatttggttcatgataagacttcctttccccacctcctgatcagcattatttaaatctgtatttttctgttagttaagaaagaaatggcttcatgatattgtatttaatagcaaaagtttggctgtcttcttcattactgttaatagctactatattttaacaaggagatttctttttttgttgttgttgttctagagtttggaatatactgattatc

SEQ ID NO: 302 - DNA, 107282 bp, Homo sapiens
agagcaggtgccggggagcccttcgcatgcggctgccgggccggaggtggtagcggcgccgggcgcgctccgcccgcccctcctccgggccgcactgaggctcgggcgcgcggggacatgtcggtggcgacgggcagcagcgagacggccggcggggccagcggcggcggcgcacgggttttcttccaaagcccccggggtggcgccggtggcagccccggctccagcagcggctcaggctcctcccgggaggactcggcgcccgtggccacggcggccgctgcagggcaggttcagcagcaacagcagcggcgacaccagcagggaaaagtgacagtgaaatacgatcgtaaggagcttcggaagcggctggtgctggaggaatggatcgtggagcagctgggtcagctctacggctgcgaggtacctgggcgcggggctgggagggtcggggacctctctagctcctctgtgcccgcgcagtaattttcccgggctccagctccggggcgcgcatgtccctgactcccggggaccaagtgccaggagcgaggcgcggcgccttctctcccccgcggtgccctctggcgtcgggctcagcggttgggacgcccctgtctgggttcggctgccggtgcccggggatctgcgggcccccttggtggccgtggggagggttgggtcccgcggagcacagtgcttttctccgagctccgggcgcctctgggctccagctgcagctgcgcaaagcggggctcggaggggctcactccagctgcgcctcagcagcggttggggatacagcagccaaagagagcagcgctcactgctgggatccgggcagccctgatttttgtggagaacgagcagggaaggaaggaagctgcctcgtggaaaggagaggttctggggatctcagaggcccccttggttcttgaaattccccgtgaaaatcctgagatggaacgctttccgctttccagccagccccgacggtgtctccataattccgccctgcattatcagagctgcacacgttgtgctttgttgaagccgtagtttttcctctctaagctcagttactcccattgatgggcgcagaatgagcatctggggcaacctcgacgggtgcctcggtggaagggcgggagccctgcggggggcctgcgggatcccgggatctgtcagcttcaggctcccagctcccctctcctccacgacatcgtgacttcccaaggtccagggactaaggtcatacacaagtctcagggacgtgtatacatttgatttagggagaaatatgtagaataaactgcagcaaaacgactgaagccaaaatgatctctcatgagcatcttgaataacagttattaattctaaatgaagtgacctcctcttaagggagtggagtttggaaagggtggaagcatgaaggggttaataattaagaatgtggcttctaagctaaagctaggtttgtgttcattcaactgttgtgctcttcaacagagatgacaaccagatgaactcacaggctttaccactaatgtcgggtgttctgtatttgacacatttcatggcctgttgtgaagacacgttttcttaaacaccctcattgcacaagaaaacagcatactcgttactgactactgataaatgattataatataatgaagcttgactgtatgactaatggggttgtaaaaatgtgttgtttctccagtccagctcttacaaaaagctaatttaattgcataaataaaaactggcaaacataagaagtattcatgagatttttataggaagttggcaaaactctgtaaagaaacattatttgatgtagatgggattactgttggatgagtggatgtgctcagtcctgcctctgtagaatccagttaattttcatttatttcatactgttttttttttctccatttgggatttggaaaagattcgaattaatagaaaaagcattgttgaaattaacagtgcaccagcatggttctttttgtgggagactaattaggcttagattgggaagctagaaagagctctacccactgagtagcctgataaacaatatatttaaaaaatacttcagaataattagaaaaaatggaggtttgattgtttcctgtgtggaacatgtaggttaggtatatattttaaagggtaaacatgagcttgaatcttttccttgtattgtacttttcttcttgggttttaaatcttcaacccgtagcaaacagctagacatttgaaagggaggtttttgtggtgaaataattcaagatgctctatatgctgcctgcatgtcattaacgtggcaagtatttttcttcaagttgtttgttcagtcattgtaggctgaaggaagagaaataattaggttgttggcaatttgtaatcactatgctggtggtgtacctccatttaataataaagaaacatgggcaaataagtagccaaataaaggcttgtctctttgcatctatttctctgctgatagtgctctatttttagcattgggttctcttgttgagtaacctttctttgttgatagcttcaagtatttcagcctctggtttgtgaatcaagaaggacgcaccctagcttacagctccgaacttcatgcatacgaagattaggaaatgtcctttttatacttaaaagtggtaattctttcaaatgtttagcccatgaaagtgacacagccaatttcccagccttcaaacctcaaacctgccaaaggcttgagttatctgctgagttggggtagaatatgaacacatctttaatttcagaagaacttgacccaagcaggttaggaatcagatgacttgaccttttcagaatagaaaataatcttttggagcagtgtaaagtgatgtatttagaaagaggaagaggaaagaagaaatacacagaaccactttctgtctgtgtttttttctggaagtgtgcagtgactaatcagttttgtatgagaataatgtcataggggaatttattacctacctactaggtgactaggtgctcttctaggtactttgggctaattcatttagtcttcataacaaccctataaagaagatgttctttttatccttgtttaaatgtaaataaagaagtgaagactcagagaggattaaaaggctgcttcaagctcatgtagctggtgggtgggttggggttgaggatgaacccagtctggaatctgagtccactgtatacccatgaggcctgtctgtaccgtgcaagagagcaaatgtaggtctacaagacatctgtctaaatgtttaaaacttatgagttaaactaacaacatttgtataaaatttcttctgtccactgatcttgacagctacatcttcataatgaccttgaagtctaggtttgcattttgaattcaaaatgttacttcccagagtcatgaactgaaatgcagttaggagactgccctggcctgggtttcttcccttttgcttcccatccttggtacagtcccacctggtaaaggacactgtgtccactcgcacgcccagtcttggtatgcacctgccactccttgaccatgatgcctctgcacacaccagtggtgatgtccccctaggccagaacagatctgggaggagcttgttcatgccctagaagctacttgggatttgagaagggaattctggggacccggatcacagactaaaaccaagtggaggggcactggttctggatagatgtgtccactttgtcctaggaagtcttcaggaagacaggttatggcaggagtggggcccggagatgtggtcccctcttacccagtctaagggcagcactgtaaaataccacgtcaaatagccttttgaatacgtagataagtgcttttattggattccaaaatgatttgttatgtgcttatagttcttttccatctcatcttctcttgggaaggcttatacaggtacattttcagctaggaatttgattataatgtaaccattagactaaatctacatctacatccacatttaaggatttctgtttaaagaccttttttttttttttttaatctcttccaaaccctggtgggttttttttgttttgttttgtttttgtttttttgagatgaagtctttctctgtggcctaggctagagtgcagtggcgcaatctcagctcactgcaacctccgcctcctgggttcaaacgattctcctgcttctgcctcctgagtagctggggctgcagatgcgtgccaccatgcccggctaatttttgtatttttagtagagacagggtttcactatgttggccaggctggtctcgaactcctgatctcatgatccgactgcctcagcctcccaaagtgctgggattacaggcatgagccaccgcgcccagccaaccctggtggtttttaagagcatttgaaatctggcataatatctactttaacaagtactgcaagatgacttactggataagtcatatgaatatttccaagtttgcccagcatcaagataacatctgtacttccagttttgcaattcaatttgctttggaaataaaaacatgttgctaagctcagatgattgcaatgcccgtagcatcctagccataaacaggcttgtgtaccttgggtacttgctgtgttgttctgactgtcaccttagtaggtctttccctttgcttccagtgtctgctttttataaaatggttcctgacttattatacctttcagtcttccctgactccccattacccccattttataaaaactgtcttctgagagatggtggtgacacagaaagaaataccctgttgattgctgcctgatacatctggatatatagattgctgcctgacacatggatacagagaaacagagagtcatagggtaccacttaatcttactgtatgctaaggaaaaatattataaaagtaatctgaaacataacgtcattagtgtttaaataccatgttttattcctcactttctgaaaaatgattttatttttctaaatttgtttcataatgcatttatgagttgtgacctgcaattttaaaagtactgcttctgaaagggagaagcctaaacatgtgtaatagagttagcagacactggccgagtacttagcacgtactaggcaaggttcatgtaatcttggcaacaactctgagacccccattttgtggaggtggaatcaggcacagggaagttaagaagttgccccaggactctcagctgggatgtgacagaacaaggctgtggccagggagtcaggcacaccttaacaaatggcctgtcctgcctcctgagacagggcagagcctggcacctatgtgaaccccatggtttgcctgttcccagatgctgctgttataccttgtaaatggactgtgagtgcatgtggaggacaccactgttagcgggttagttcttgcacctggatgaggcctctccttttacatgcagatcctggatttccacagacttttccaggtacagtatcacatcagccggctttgctactttattagcgctcaagctggaaggtagaaactgctacttagaactcgtcttgtggattgtttggtaaatcaccatttgttcaggtatttgaggacaggcttttaaacaacaacaaaaccccctgaactccataaactcaacctgtcaactactaaggaataaattacacatgcaaaaagtcagtggataaagccaggcatggtggctctagcctgtaatcccagcactgacggatcgcttgaggccaggagttggagaccagcctgaggaatatgatgaaactccgtctctacaaaaaatacaaaaattagccaaagatggtggcatgcgctggtggtccctgcttctcaggaggctgaggtgggaggatcacctgagcccggggaggttaaggctgcagtgaaccaagatcacaccactgtactccagcctgggcaacagcctgcctcaaataaaaagaaaaaaaaaagtcagtagataaaagaattctaaattgccaaaggaaggaaagaaaactgcttaacacattccctttggaacagtggttagggaaatgcggggtggaagcagtggttacaatgtgtgctttgaagtgcgatgaacctgaattcacatgtggccctgtcattcagtgggtatatgtgattaggcaatttccttcacccctctgagcctcactttctccatacatatgtgtgtgtgtgtgtgtgtgtgtgtatgtgtgtgtatatttcagacagtctgactcctgttgcccaggctagctagagtgcagtggggctatcacggctcattgcatcgttgaccacccaggctcaagtgatcctcccacctaatttttttttttctttttttttttttttttttttttgtggagacaaggtttcactgtgttggccaggctggtctcgaattcctgggcttaagtgatccgtcagcctcagccttccaaagtgttgggattacaggtgtgagccactgcgcccggctactttctctgtatgttgaaggaaatcatcctggtgcctttgcagggctgtcaggaggactgattggtgagacaccaagcatagtacttaggacatagcatgtcagtgttgttattggagccacaagctgccactaactgttggttattctctatgatggagacagaggaaaggggtgaagaaaacaaggtattcacatctatttggtgcaataatttggagaagagtatagggttactttagggtcaggggtgttggtgtatgtttgaacttgaacatgggcaaatattctctaaactgttcctcctgtttctagagccttcctcattctctatgttttggtggatttttacatatgtgcagggaagttagactgtaacaacttgaaggcaaggaactgtcttaattttcatcatttaaaagttcatagcgggacacaattcttcaacatttaagcatttgcttgaatgaatgaaaaaggatcaatgttcagcaaatgtttaaaagtcattgatgtttctgtatctgaactaattggtgatattcctttatcatagacatggcgagggcaaaagtcaatctgtgtttttgttactgtagtcatatcacattcttgcatccttacagctttatgtcagtgctgttggaaaatacacctttcttcattgacttacttgctccaaacaggaactgaaaggtggtaatggtagccaattgactttgaagtttaggttgacagaattcttttgcaaatgtgatcttccctgagtcccacccactgtcttttcctttgctcctaacgtgcccctgctacactagttctgcctgctgttctcatctctgtgggtacatgtttgcttttgctgtcttctgtttgtccttttcctctcagcctaaaacaacctggcagcccctggtctccctcgcctagcccacagctctctgtcaagaagtctctttctagatggagggaagaatcaaatctgaattttattttccatgtggcacatgctttggccacatggtttactttgtagtgcatgctcttgctcttgtttcctgcactgggctagttcaagccttcacctgtcttttcaaggcacctcttctgttctctgccctcccagtctcctcctctgcaagctagaccagccaccctccaggcacttcattcacgacacccctttcttggctgagttttcaacctctctggcccattcatttcagcatatacacaagttgaagtctctctcttctgtttaaaccaccaccatcccccactaccacacaaataccttcccctcctccgccctgtattcccccaccgcacatgccgctccgtctttctccttccctttctgggtttttcctcttttgcctgctcttcagtgatgacatttctctgtcttcgggccctggctctctgttttttttgttgtttgttttgttttgtttttttttccttcactcctgcgtgctgtttttggatgataagacccttcctgtggctttaattgctgtccatatgcggacaacgtgtgactctgtatttttagccctgatctgttttctgagtgccagatgtattcagacaactttgaaatggacagtgccacttagtaccccagagaaacctcatattcaactggtctgaaaatgagtttctcatcttccttaggaaacctgctcctcttcctcacttccctcagtgggcggcaggcgctgctgtgcacagttgtcccagcccaagattacgtggcatgcttatctcttgcctcctccttgctgtcacacccaggagtcacaaagtcttgttgatgctcctacagctctggaatatgagtccccactggtccctgccactgccttaatccagctccttgtaacttctcacctgtataatagcaatggtcactgtagtccagtttctttcaaattacggcaaccactctttctgctactgcaccctccaccactgctgctattgtttctactactgctgggactaacccagctctcaggtgacagccaggagatttatgcatcttacctcataccatcaatcctcccaacaactttatgaaggagatggtgttatcttcatttcttcattttttggagaaagcagctgagatctgagaagttgtcccttgtccttgtccaagttcacactgattccaaagtcacttagctatgatgctcccattgctcccagtagctccatttaagaagtgctgattgcggccgggcgcggtggctcacgcctgtaatcccagcactttgggaggctgaggcgggcggatcacgaggtcaggagatcgagaccatcccggctaaaaaggtgaaaccccgtctctactaaaaatacaaaaaattagccgggcgtagtggcgggcgcctgtagtcccagctacttgggaggctgaggcaggagaagggcgtgaacccgggaggcggagcttgcagtgagccgagatcccgccaatgcactccagcctgggcgacagagcgagactccgtctcaaaaaaaaaaaaaaaaaaaaaaaaaaaagaagtgctgattgcaaaccttgtccttcatgggtgctaatttaatcctcgcagtaactctgcaaggtaggtgaagaaactgaagtacagggagtttgagctgcaggcctccgtcagaggccacatggcgggcaggtggcagggtctctggttcctgggttgggcctcccgctctgtccctgctccagctccccacggtgcttcagagccacctccatgggctgcagctagtgtgttttctaaaatccaggtgggatcttgttccgcacagccttcaggataaagcaggagccccttagcacgtgaccagggctcaggggtttccctgccccagtctctggacttgtctctaggcacccccagccctgctgtttcagctatcagctgagtccctaaggcagctcagcaggagcccctctgccataatcacctccaccccctcccctgcccccactccctagctgtctagcttgcacctgttcttagcctggtacttggcagtgccttcccaggagcttctctgatccatctcctgctgtcaggctggctctgtggcctttccagggtccctctttctgtaatcctgtctcccaccctcactgcagcctcctgaaggcagaatcttgtacctttgcagccctggtgactctcacacacctggctgcacttgggtgtctctgctatggactgaatgtttgtgtctccccagattcataggttgaaacgctagtccccagagtgatggtatttggagggaggacttcgtggaggtcattagtgttaggtgaggtcgtgagggtggaggtcctgtgatgtgattaatgcccttaaaaggggaggaaggggccagagctcgctctcactgccatgcaagggcacagcgtgaaagcacagcaagaagatggaagacggccacctgtagaccaggaggaggatgctggcaccctgatctcagacctccagcctctagaactgtgagacagaaatgcttgttgttgagccactcagtctgtgctatttatttgactgtcagtgagtgacagtggctgcatcttctggttacatgatgtgcatttcagaaatgtgttcccaaaattaagcatatgaatataatttggctctgcctgtattgaaaacctgctctttcactgtcaacttgaagttatggttctttttcctggttataaattataactatggagtcctttgaacctctgaactaaaaggaagttgtggcgtaaggcacagatgtatggggtaatgaaagtcttcaaagaaagggatcacgagttactgccattctctgtaattttaagtcttcagcatgtccaagaattttgtttgcacaggaattgcttatttctatgtgagtagaaatgcttgtgcaaggaagtagcaagtgcttttccatctgtggataagacttggagcaacaggctcacacaagtcttcacagaacaagaatgaaagcctggattcctgcctctgcttaaaaggttggggccaatacattctcactaggtttttcttagtcagcactggcattttggaaatctgttccactgagtaaaagcttagaaaaaagaagaccagaacgtgggtgggtctctaaatcatcactttatggttgaggaataaagtgattaagaaacagcttcttcattttgaaagaatccacggggaaatctgtggaaggagctgtggagggctggaatattcattcactcactcattcatttatttgttcaacagataacatagggcaggaaaggggttataaaaagcttcacccttttaaactgtgtaagggaaaaagtagaaaaagtaaaggaacgaacacttcacattatggcagaagaatggaggagaccatatgattgaaagctctttggggcagggactctgtcctgttcacagttgtgttagtatattccacacagttatttcgtacatagtggctgcatatttctttactcaaagtctgtgttcaggaaaggatatgataaattcactgacattagattgcaaatgactaaaaacaacttacttatctttcattttaataggaagtcagatcttaagtaagagaaagtaatctcttaagggctgggcttcaggaatgaataagccagggcaggatgtatgctttgtggctgtgggaaccttgctggcacctatgagattaattcctgtcggctgttcccagtgtgaggtagtgggaatggcccttgcctgtgagctccgtcctagtcgggccaccgctgaccagctagatgagcttggcaagtcattttcaccaacagagtttgttttcaggttttctttcttgatttgaaaaaaaatgagggagatctgggactttctagctctaacctttagatgttctatgctaaagccagggctgcactggtgaaagtgagatgtatcaaagaaagggtgatattgaaagcaggagaaatagaagtgtcttccccttcaaggcaaacctgagacaaggattagactagttcaccaaagggccatcgaatttgcagagctaatttcctgtagctgaagtgggagcgtatccatcctgcactgggcatgatgtcttgtgtgagtggcttgggtagggactagaacgtaaggattagattaataacttttttttttaaatcatcttttcctcctctgaaacctctccttaactattggctttcaagttaagtttggaatctgacagcacagacactcacagccaccatagctgctttttctttgcatttaattgggttaacttttaagaaatggcatgtttgacttaagatttttaggcatataacctataatattggctttggggggtgcttttctgttcttattatttgtcctttatcttggcacctcataattaactaatggtggtatttattttaacttgagggaggttcattttgagatatgaaatgagcatctgagagggaaaatcacagcagctttcagaagtgaaatttaacaaggtgaaatgtacaaattagcttgaataagagcatgactgaatctatactaagcaaattactttctgttggggagtttattcctggaatgtctctttatagttagttttaggactaataggatgggataacaagaaaaacttaagattttttatggacagttctggcaggaagtgaaaagcagaacttattctttgtaatatttatttatttggtataatgatagaatcataaagcaccatcagataatcccatttgacccacataaatactcagtgatataagtagctactccattttaaaatgagaaaacggggaggctccaagagtcttagtaacatgctcaagtttaaactgccagtaacaagaggaagacttgcttcctggaaactgtgaacatcagttgcaccatttccccccagataccttccatgtattctagcatgtttggccaatacactgagcaaatcttttttgtttgatttacttgatacattttcaaatatgcttcatcttagttgaacagtttacaggattctgttatttctcaagtgaaccatttacaggagtcagccatttcttaagaaaaatgcaaatcctggctgggcacggtggctcacacctgtaatcccagcactttgggaggctgaggcgggtggatcacttgaggtcaggagtttgagaccagcctgaacaacatggtaagaccccgtctctatttaaaatacaaaaattagccaggtgtgatggtgggcacctgtaatcccagctactcaggaggctgaggcaagagaatcgcttgaacctgggaggcagagaccgtagtgagccaagatcgcaccattgcactccagcctgggtgacagagtgagactctgtctcaaaaaaaaaaaaaaaaaaaaaaaaaaaagaaagaaagaaaaagaaaaattcaaatccattatctctgaagtagacaccccagtgagtgagctacttctttctttctttgccaggtttgcatgagccgttggtcatggagtccttgcactcttggtctatctatttagatggaattgactccatgctcaatctcttttgaggttaaaagttagaaactcactttaaataaggcaagggatacagagtatatattttatcttacatatttgaaagcagcagatattatcattgacatggtagaagtaatgctttttctaaatacaatgtaaaaaactattaattacttggtttgcttatgctaaatgatgttttcactcaagtccttagctactgccgccaatcatctgttaatatttttctcttatatttgtatgtcaatagcgcacacattggtaaagccatttcattcatttctgctaatgttaatggaattaaatctgtttcaagccaggtaggtgaggtgttgagttttcagattggcagagatagcttttctgtttggttcttatgagctaatactctacataacaattcaaattagtcaactggtttttctcatgtttgtgttggggtgtggcagctctctgacaagtcaaaagaaaatgagtaattgatttggtgctaaaacatgattatgcttgctataatgaaagcaccctagaaatattaaaactaaaaaacaacacgtactatctctgttagacaagtgccttttgttatgttaagatattccatttcttcttcatgcgagatggttcagcatttactaatcttataccagaagcagtttacatggagagatatttagataatgaaaacttgtctgtacttaggtaaatggaaaggttgtcacctgaactagccagagactccaaagcatttagctgccagtcatgccttaaaccttgggaacatcccatgttagacttagattaagaacccttttggggtttcaaagaggtgacgggctgcattcaatggtgaatgatcccaaggttgagttaactcatcactctgaagaagaacaaaatgaggaatttacttagttaactactgacaccttactataaactctgaaggaaggcaaagaatgagatacagataatgtataaaatatttagtaaaatgaaattctcatgtcagctgttaaaaccacaactccgaggatgtgagagagtgtggtctatacaggaggggtggagtgggtgtggacctcagccttctgctctaggaatccatgcttgtgaatgtcttcctaactctagccccactttacaaaatcaaaacaaacagaaaagtttctaagtatggcttcttactggtggtgggaaacagtttgtctcattatctcatttcagagatgcctactggttatactcacaggttcttttcacatcctttatgccctgattgagaggatgtcttagtccattttgtgttgctgtagcagaatacctgagactgggtgatttatcaagaaagagccttatttggctcatgattctggaggctggggagtcccagaagcatggcactgcatccgttggcttctgggcttctagggagaatctcatgccatgtcataacatgatggaaggtcaaaggggaagtggacacaggtgaagggtcaaaacagaccctgccctggagggaactaacctgtcacctccagaatgaatccagtctcacaagagcaagaactcactcactgtagtgagaactgcaccaagacacctaggcccagagggcggagtctctgtgacccaagctcttcccattaagttccacctcttaaagtttccacctcccaacattgctgcactgggaattaaggttccaacgtgcgtttcgatggggacactcaaaccatagcagagacattgccttctaagatagaccctcccaccttcctgggctgggggagctggcttggtctatctagaaggatgagcaggctgcccactacctacctttattaagagtgatttcagtcatcatacttggctaactttaatttccacttttaaattatctaatcctttcagagaaattttggggattaataaatatgaaaaaccatctccccaaaagctcagaatatttatgaaagtattattagcaacatctactatgcttttgctataactaattctgccttgttaatctagtattcaaattaaaggttgttctttgacccaatggggggcagaggcttatgagatttttttttattatggaataattttggtggagtttctaccttgattgcaaatttggtgacacagcaggttttatgactatagaataatttaatcaacactccagaatctaatcaacactccagaatggaaaatcttgttgggttgcttcaagagaattacctttctgcaatgggagctctatcacatttgagttaagtgataatagataacatgtattctaggtaaaactcttttttcatagggtatcttttatatgtacctagaaaagagatttggatgatacatgataactatcagtagtgctttttagtatcattatgggtaatttattttgtttatctgttttgtgcaatgcacatgtatttctcctataagagaataacttcaaagttgttttttagaaggggtgggcatgagtatcccactgttttattgtcatgggtaagaaaggggcacaagccctctcctgccacagggctttacaatgtttggaatagctcaattggtgttttttccatcttctttttgaggaagatgggctttaaatttttaaaaaattataaataaggaaaaaaaagccagtagatttgttcatattagcttctttatattttcagaggaagcagccataacactttggatagaacacatggcactttggatagaacacgtaacactttggaagactcctttggtgtcttcatttttgggggggcaggaaagacagtctctgaggatgaggatggtaccactacccacaggacggaaggaaaggtaaaaggaagattgaatcactcttcaacttccttctggagcccagccctttccacctgctcaggggctgacttctccggtatcatcagccattcctttgtttcaagagtcatggaccgtatactgaagatctgtgcagtttaggatatgtaaattatatctcagtaaagtattagaacacaaatacacacaaaagcctttctgtctttctcttcctctcttcagccagatttgacagagagattgtctatatcctttgatcgcattttgtcaacttctgtgcccctcttagccactgctgtgtggcttgtccttcttttccacccagaaggctcatgacctccatgttgctaaattccaagtgcccattccagtttttatcttgtgtgctctcggctttctaagccactctatcaattacccaaccatcagccttcccagcatccgtccatccttctgtcagccagtgcgctgtccttctgtccctccttccaatatccacccaccagtcccttcgtctgtctctgccaggcattctttttttttttttttaaacaaataagctttatgttttagatggttttagatttacagaaaaattgcgaagacagaacactattgccatatactctgcaacaggttttacctgttagcaacatatgttagaattatacatttgtcacaatgaatgaaccaatattgatacattattattctctaaagtccatactttgttcggattctttagtttttgcctagagtcctttttctgttccaggatcccatctgggacaccacattgcatttacctggtatgtctccttagactcccttggctaggccagtttctcagccttcctttgtttttgatgaccttgacagtattgtggagtactttttaggtattttgtagaatgtccctcacatggcatttgtcggatgtttttctcatgattagactgcgtttatgggtttgagggaggaagacccaaaaggtgaagaaacacttttatcacattctgtgaaggtacatcctgtcaacgtggcttattactgttgatattcaccttgagcacctggctgagatactgtctgtcaggcttctccactgtacagctactccctccctttccacactatattctttggaagaaaatcactatgtgtagctcattcttttttttttttttttttttttttttgagacggagtcttgctctgtcgcccaggctggagtgcagtggcgcgatctcggctcactgcaagctccacctcctgggttcacgccattctcctgcttcagcctcccgagtagctgggactgcaggtgccgaccaccacacccagctaatttttttttttttttgtatttttagtagagatggggtttcaccgtgttagcgaggatggtctcgatctcctgacctcatgatccacccgcctcggcctcccaaagtgctgggattacagacgtgagccaccgcgcccagtagctcattcttaagtaatgggaagttatgttctgcctcattgtgtagctacataatttatatggaattcttttgcgtgggagatttgtctcttcttcctcattggtttatttagtctgctttatttatgtcagtatggttcacgtatatttattgtttgtcttggattataattcaattattactttatttcatggcccatattattccagctttggctattgcgagctgtttcgattggttcctgtgttctttgacatacccccatgatcgtgtgtgtgtatgtatttaatactactttactttctagcactacaaaatactctaggcttatcttgtatgtttcctgccccagattcagagtcagccatttctccaaggaacgctgattccttttattagagaatggtattagaaaccaagatatggccgggtgcggtggctcatgcctgtaatcccagcactttgggatgccaaggagggcagatcgcctgaggtcaggagttcgagatcagcctggccaacatggtgaaaccccatctctactaaaaatacaaaaattagccagacgtggtggcatgctcctgtaatcccagctactcgggaggctgagacaggagaatcgcttgaacccaggaggcagaggttgcagtgagccgagatcatgccattgcactccagcctgggtgacagagcaagactgtttaaaaaaaaaagacgaagaaaaaagaaaagaaaagaaaccaagataagggatgccaagtgtacttgttgctactgaaatgtaattgtttctaagatctctcacatgacagcaagaaaatatatgtgtgtattcttattggcgtatacatatctacaaatatttccatttgtaaccatcagcatctatatcaagctaaacatcagctcatttgatgtcttcgattctaatccattactacatgggttgcactagccccctttctttgcctgtctttaaactcctactccaacagagacaaacctgtggttcccaccatccgtatccattcccttaattgttcagttgtagtatatatgtacagcaatatcagaattgttaactcaatccctatgggaaacaactttatcaactagaagatggcgcttatatgcactccttttacatttgattttaacagactctacttatttctagttacttaggtcagtacccttttcccctatccccttcagtgaggttgttgcatacatttgtaatatagatagattgttttgtcacattctgcattccatcctgggatcccccaatctcctaaatgactttttaaatttgcttacattgtacattaagattcattctttgtgtagtcagtcctatggactttaacaaatgcagagtgtcacgtatccacccttgcagtatcatacagaacagttgcaccccctataaatatctcctgtgctttatccatttacccccctccgtttattttcttttcttttttcttttttttttttgagacggagtcttggtttgtcacccaggctgggtgcagtggtgtgatctgagctcactgcaacctctgcctcctgggttcaagtgattcttctgcctcagcctcccgagcagctgggactacaggcgtgcgcctcaacatccagctaatttttgtatttttagtagagacggggtttcgccatgttggccagcctgatctcgaactcctgacctcaggtgatctgcccacctgggcctcccaaagtgctgggattataggcgtgagccaccgtgccaggccaacctctgccatttcttcctgaaccactgatctctttcctattgctatcgttttgccttttccagtatgtcatataattgaaatcatacagtatacagcattttcagactaacttctttcactacacaatatacatttaagattcatccgtggtttttttgtgacttgatagctccatctttttatggctgaataagatgccattgtacaaatgtaccacagtttatccacttggctcttgaaggacatcttggttgcttcagtttttgatgattatgagaaagcctggtataaacacgtgtgggtggacttttgtttggatataaatttgaaattagtgaggtcaaaatgccacatgcacttttaggtgctagggacacaggtgcttaggatacaacagcgaaagagtccctgtgctcttaaaaacaaatgcaaatgaataaatcagaatggcttcagctcacgagtagtgctaggaaaaaaataaagctaataggataatgagtgagagactgtggccaggttagtggggccaggaagggcttctttgaggaagttcattgcatttgtatctgagcctgcatgatgagagatggcaccagcggtgtgcaaagccctggggggacatactgggctcagttaatgcaaacaccctctggcaggatgaatcttggcatggccaagggactaggaacagaaagtactgtgaggtaaagacatgaatgagagtattttcttaaaaactttttattgtaggccaggcgcggtggctcatacctgtaatcccagcactttgggaggccgaggcaggcggatcacgaggtcaggagatcgagaccatcctggctaacatggtgaaaccccgtttctactaaaagtacaaaaaattagccgggcatggtggcgggcgcctgtagtcccagctactcgggaggctgaggcaggagaatggcgtgaacctgggaggcggagattgcagtgagcggagatcgcaccactgcactccagcctgggcgacagagcaagactccgtctcaaaaacaacaacaacaacaaaaaactttttattgtagtataacatacaaagtacacaaaacccaagtgtaagtgcacagttgatgaattttgtcaaattgaacccacccaccttccagatcaggaaatggaatagtgccagcactgcaggggtccctcgtgtgtgcttatcccattatcagcccccttccctccctccaaggtcatctgattaattttaccttcttaaaagcttttatgtctgtttttttgttgttgttgttgttcaacattagatgtgtgagatacacccacattgttgcatgtcatttgaggtttgatcatttcagttgccacatagtactccatgtgtgaatacaccacagttgtttttttatcgattctacttttgatggacatttgggaggccttcagttttgagctattctgaattgagctcccgagaatattattgcgtatgtcttttggtgaacctatgtctgcatttctgttggcttatatacagagtggcaaaattgctggcttatagagtacgtgtatattcagcattgctaggtactgtcagatgatttcttaagtaattgcaccaatctacatgcccactgcactatatgaaagttctgattgtttcccatccttacctacgcttgttattttctgactttttcatttagccgtctgttatgtaatatagtggtgttgcattatggttcgaatttacatttacctgatggctagtcaagtccagccccttttcatatgtttactggcctttggatatcctctttgtgaagtgcttgttcaattcttttgcccatttcaaagagaaaaaacaacaactttgggtttgggttgtcttttatatatcctggacattgatctcttacagtctagatatgagtcctttgtcagaaatatgtgtcccacttggtgaactgcctttttcactctctgaatggtgacttttgaggcacagaagttcttaatcttaatattttccaatttgtcagctttttcctttatatttggtacattttcaacctatttaagaaaactttgtctgctacaaggtcatgaaaatgtttttctgtgttacctttttgatgcttcattattttaccttttatatatagatctgtaatccatctgaaattcatttttatgtgtggtataatgtagagattacgattcatgatccttttgtagttcatagcatgatgattgggtgttcacatgcatgtgtgaaatgtgccagccttgaaccttgttacaacattggcacatgacccatctgacctgaatttggaacacccagttgacccagcaccattcatttaaagatcatcttccctcactacactgtagttacaaataaggggataccgtagattgaatgtttatatccccctaaaatttatatgttggaatcctaagccccagtattatactattgggagaggggcctttcggaggtgattatgtcctgagggtggagcactcatgaatgggattagtgcccttataaaagacacaagagagctctctttctctgcactccatcatgggaggacacattgagaagttagccatctgcaaaccaggaagctggctctcaccagacataggatctgtgtggtaccttgatgaacttcccagcttccagaatggtgagaaatatatttctgttgtttaaaccaccagtctgtggtagtctgttaaagcagcccaaactgactaagacaggagaccttgtatgtttggctctatatagattctagtgagtatgttctaatattaggtagagcctttctgtcttgctcactatactccatcttcatttcctggcagtggcccctgtgctgtaaatattcaataaatatcagctggttggtggacaggtctgaacttgcctttaggcaagagttttaaaatatctgggctcccagtccaagaaaagatactcagattttgtgttagagaagacttgacttgcctagttaattacatttcttctctaggcccaaatatgtttctggaccagttctgctggctaaagtccttggggaaggctggttgacctcaggttgtccagttggcagtaatgaatctatttaaccatccagccagtcatgcaataaatatcttttatgggcctactatgtggcaggcataaagtagaactaaaataataggattatttccagagtttctatttttaattttagaacatttgttgtttctttctttacaagttaaacactcagtgcaaggagggtaattttgagaattttcctctattttgagggtagctttattgttctgttatagttatttaaaatttttgtgtgtgacagcctagataaacaggcaacaggcctaagaattagagcttttatgttgctatcagactattttaaaacaaacaaaaccctacaaagaaaaagagatgaaaataaatgtgaagtgcagtatttcacacagtgaattcagcgagaagttaagtacttttctcattttcaaaatttagtgccagaccaaagaccaagtttagaaaaatagaggaatgcattttcaggaggttggtgtggactctggatgtgccagtcagtgccagtacaccagatcgcattgtgagtgggccacgtgccatataccatgtgtcacatgccacataccgctcttcttcttcttttttttttttttgagacggagtctgagtctccctctgttgtccaggctggggtgcagtggcgctatctcggctcactgcaagctccgcctcccggattcatgccattctcctgcctcagcctcctgagtagctgggattacaggcgcccgctaccacgcccggctaattttttgtatttttagtagagatggggtttcaccatgttagccaggatggtctcgatctcctgacctcatgatctacccgcctcggcctcccaaagtgctgggattacaggcctgagccaccgcgcccagccaaatgctgctcttcttggtaactgccctctggggaacaaaagagccctagaggcttctcccatggtaccatcttgcttggtgacaccaggggctggggttatgtcccagggtctctttgttcctcctttcctctggggatatgaacaaagaggggcaggggacaagcagatccccaaactggggccagctccaggcggtagctgttggaaaatggggctgcctccgccagcacttattgtccaccactgcccatgtctggtggctgcagtttgagctgctctgaagccttttgaggccactgggagaggcagcctcctagcaggcctgcctcaggaggaggaagcagattgctaagggaacagggtggctggtgcttgtgaatgttacttccgtgatgggactgtgattctcgttcttatttagttaatatcatgtccaatttcattttcagcttgtctcaggtgaatattttatatatttagtgaaacctcaccaaccttgaagtcaggaattttgtaactccagtcatttggaaccgagtgaaggaacctaaaggaaagcagaaagaggccaggcgcggtggctcacgtctgtaatcctagcactttgggaggccaaggcgggtgaatcccttgaggttagaagttcaaaaacagcctggccaacatggtgaaacctcatctctactaaaaatacaaacattaggccgggcgcggtggctcacgcctgtaatcccagcactttgggaggccgaggcgggcggatcacttgaggtcaggagtttgagaccagcctggccaacatggcaaaccccatctctactaaaaatacaaaaaaattagctgggcatggtggcacacacctgtaatcccagctactcaggaggctgaggcaggagaattgcttgaacccaggaggcagaggttgaggtgagccgagatcgcaccactgcactccagcctgggtgacagagcaagactccgtctcgggggggaaaaaaacaaaaagcagaaagagtagctttgagaccctaaagagatacgatattttggggtatgctggggtatgttcttgatttattacagaggtccttgggcttccatgtagagcttctgtgctcttactttagccacatttctaacaagtttggttttctgcttttttagttcactagatttagaagcaacaaactaggctgctaggtatacgttctgggagaacatctagaagtgacagctgacagcctgacagtaagggaggagacagagcatctataaaaagctcggaagaccagagctgtcttatatactgtataaggcagagagctctgagcctgttgcagcctggagcgtgtcccgagaggcagtgtggcaggacgcctggccacaggagtgacctgagccattcagaccccaaaggcaggcacacgaggaatcccttagagagatttgaagaaaaagagttgaatactagttatctgaaataatttacatatatagaacccttgttttccttgggatactaaacacataaaagaactccccctttctctccatgtctccgttctccccttctctcctcccctctttctctccttctctcctcccctcttcctctcccccttgctttcctcccaccctttctgcggcccctcccctcccgactctcctctcccccactcccctcccaccttgctctctccctttccgttttcacttccccttttacttccctcccccactccttctccctaacacaatacagcgtcccttttttttttttttttttttgtctttgaggttcacatatatgcagtgagttgctggtgaaagtttaacaactggctctcatgggagaaaaaaatcccttgattcggccgggcgcggtggctcacgcctgtaatcccagcactttgggaggccgaggcgggcagatcacgagctcaggagatcgagaccatcctggctaacatggtgaaaccccgtctctactaaaaatacagattacctgggcgtagtggcgggcgcctgtagtcccagctacttgggaggctgaggcaggagaatggcgtgaacccgggaggcggagcttgcagtgagccgagatagcgccactacactccagcctgggcgaaagagcgagactcccgtctcaacaaaacaaaacaaaacaaaacaaaacaaaaaaacccttgattcacagcagcccagtttccttagtgtaagtcctcgccatggttgatttcaggtgaccattgtgaagtccctggggaggagcagggacaagtacttcctccatacagatgcaggagatggaagtaaccttaagagcgtaagaataggcagataacaccaaataatcagaaagtcatgttttgagtatttacaactttattatataattactcttcttatacaattatataatttaatttaaaaatttagtaacatttaactcaatgtatcaaaaatattatcattttaacatatcgatagaaaattattattattatttgagacagattctcactctgtagcccaagctggagtgcagtggtgcgatcttggctcactgcaacatctgcctcccaggctcaagtcattgtcctgcctcagcctcccaagtagctgggactatcggcacgcgccaccacacccagctaattttttgtactttagtagaaatggggtttcaccatgttgcccagggtggtctcgaactcctgagctcaggcgatccacccatcgtggcctcccaaagtgctgggattacaggcgtgagccaccgtgcccagcctcaatataaaattatcaataagatattttacactccttaaaaatatctaaccttccattatagttagaggtgatcctatgacaaattttgaccagtgaaatgaattcactgcatggagtttttgaataataatttaatggtaactgattctgttgtcatgggaaacttgtctttttccttacttcctgaaatgtaagtagaagaggaaaaaaaattaaaaatagaaacaataaaataagaacttacatatgacgtctttgaactgttgaacaaatgccaatatccaactatgttggacttctctgtatatggcagaaaaaaaatcatatttagtctccaaactgctgttaaaaggttgtcgttgttgttagatgctgctaaacccaatggttgagtaaaagagaaggtgtcaaaagcagagacctgcataaggtgaaggcacaggacaagtgaattgtgaatgaagaaaattctaggctgatgaaatcgaacatgaaaaggccgaagcgggaagaagctgaaagtagaatgaaccaaggtttactaattaccaataccatgcaacaaactcccccacatcttagtggcttaagaaatgactatcatttattttgcttgcaaatctgatttgtgcatcatttgttgggggtgactcatctctgcctcatggggaattaattgatgtggcaaacttagggcctgagtatgtattttcaacatgacttactctgcaaactgttggggccatgggccattgtgtcagctcttcagcatacaggcttttccatgtgctatttcggtttccttgctgtatggggactgggctctggagtaaacatctcaatacgatcaggaagaagttgtattgcttttaatgactttgccttggaggtcacatagtattgcttctgttctaatcacagttctaacaaggcttcaaggaaaaggaacatagattttaccttctgatgggaggaaagtcaagtgagatcaccttgtgaggaagggaagtggaatgggaaatattgttgaagccagttttggaaaatacaatctgccacacaagaaagaataagaaaatatgggtgatgagaactgaattcaacacatactcattacacttttgtcatgtgctagttactttttttttttttttctttttttgagatggagtctcactctgtctcccaggctggagtgcagtggcgcgatcttggctcactgcaagctctgcctcccaggttcacgccattcttctgcctcaggctcctgagtagctggactacaggcgactgccaccatgcctggctaatttttttgtatttttagtagagatggggtttcaatgtgttagccaggatggtcttgatctcctgacctcgtgatccgcccgcctcggcctcccaaagtgctggaattacaggcgtgagccactgcgcccggctgctagttaccttttaagcacccgtgatatcgaagtagaccaaagagacaaaaatcacttcccttccttgtgggttttacattctagggaaatgagagagaagagtgatacgtgatgaggttagaagaaacagagccttgtaggttacagtacgactcttttttttttttttttaatggtaaggaatttgaattttgttcctgagtatgatagcttttatgcagggaagtgatatggtcttattattttttatgactataaaattaacttttatttaacatttttttacaaaatacatttaaaaaattttaaatctgttttttagagcagttttagattcacagtaaaattgagaggaaggtacctttcctatgtactctctgcccagtcccccaacacagcctccccaccaactcccccggcgtgaccctccattggagcggtacattggtcacaatcgatgaacctacgttgacacaccattatcacccaaagtgcatagtttacatgagggtccactcaaggtgctgtacattccatgggtttggacaaatgtttaatgacatgtacccaccatggtagtttacagaggagttccactgacctgaacattctctcgttattgtgtttgacagctggcttataaaattcctgaaaatttaacagtggtctctagtgagctggtacaagccagctccattcagcacaccattgtacatacctaatatcttatagttgagggattctctgtaattttgtttgagcataacaacaatctaactcttttataaggagaatcccagaagctcacatttaaaagagacccgagagatcttctgtcctgacctttctgcctgacacactgattccatctatagcatggtaaaaggatctttcagggccactgctgctcagatttctcacgtctccacacagaatctgtgattgacgcacacatttgaaagttaagtgattttcttcaggctgcaaactgggactggaatttcgtctctttctcttgttcttctctaattttattctcatgcaaacagcctgatttctgatttcataatttagcacaagacatattttatttaagtagggatgaatttaaagatcacagaaccatgtcattaagtgaaatcaacaaatgtttatcagcattcagaatttctccatttctttttttcttttttcttttttttgagacggagtcttgctctcacccaggctggagtgcagtggtgcggtcttggctcaccgcaacctctgcctcccgggttcaaatggttctcctgcctcagcctcctgagtagctgggattacaggttcccgccaccatgccctgctctttttttttgtatttttagtagagacggggtttgccacattggccaggctgttctcaaactcctgacctcaagtgatccgcccgccttggcctcccaaagtgctgggattacaggtgtgagccactgcacccggcccagagtctctccctttctttgctgaagaatttatgttatgtattcatcacctatctataaagtggttatagctgggaaccctttgcagatgggtaattcatcattagacgggttatagataatctctctattcattatatggcattgacattcagaactaatggttaaagtcactctagatgggaaatattagattccttccctaggccagggagactagacagctttttagaagatctctgtaacccccagcattggtgcttttatgacaaggtgaagctcttttgtaaagctgtgtttttgtgtgtgtgtgttaatgcaccagaccattcctggcctactgtgcaaggccctgtggtgcaggtggggaggcgggtagagatagagagcgaggtacagctgagtgcagatccccagctctgagcatcactgggtgtgtgacttactcaattcatcatttagctattgagagctgatgttaggcatattctttcttttcttatgaagccttggtttattgtgggcctcagaatagaagcttcttggcctgaaaatgaagttctttggaagtgccatctgacacttctcctggtgggcagagttgctgaaactggaagcagggggtttgaggggtgctgtaactgatgtggggagaccgactggggacaaagaatgaggatagtaacaggagatgactcctcctccccaggaggccagatgcatccagaggcctcacatggctggatgtaggttacaaggtcgctctcacagtcaaggtgtgagcaaggccttggtcttcccatcagccatgctgccttataagccactcagtcaactccccatccacctccaaactgctgcttgcctggcctccctcttcattgatgatgtgatgagccacccaaatagacctggagttttttttgtgttttgaaataattttaatttacagatttgcaaagaaagcacagagttttccccatgtacccttcacccagcttcctccaatgttgacattttcctgtgcatttctcgacactaagaaatcagcaatggtacaaggtagctaatgacaatctttattgagatctccccattttttccacgaatgccctgtctcttctagcatgtcttctaggaaaccacattgcatgagtggagttggttttcagctcctctcattttctcccacacttggcaccacctaatctggtctcttatccttacccttttttttttccatccctatggtgagtgcccgggcccagccttttccactcatgtggagcctttggcaccctctcctggactcccttccccagattctcccaccttgctgtatacatgctgctcggagaggccactgtaaaaatgactcttctcagggggctcagatctctccctgaatgaagtctgagctcactacagccctcctttgtaactttccaacttggtcttgcactactttccaatttcagccttcttctgcagacaggtgggtctcttggcagacagatgagtctctttaactctgtttaatacctgaggatgcctggttctcactgtgttttcctaacgtgctttatcttgttcagtcttcagaataatgccgatgccagccagcgctaggaatggaggcccgcagaggcttatggaactggcccatggtcactcagccaggacatgggagcccaagactgcagacctgaggctcctaagcaccccaatctctcatctcaacttcaggatagcctcgtgagttctgctcacgccattcccaggatcccccatcctcaaagcttcctctgtcttagtcctgcccatccttcaaagcccaacttgaaccccgtctccatgaggtcttttgttttaggctgaaatcaatttgcttatttggcacctctccctcccccccacccccgagatttgttaaggtattattgaaaaataataattatatatacttgcagtgtacagacatgatgctttgataggtgcatacgttgtgaaatgattaaatcaagctaattagcatattcatcacctcacatacttaccattttctaaattgtgagaacacttactaacttacccatacttcttggtatttataaatcaattacaaagaaatgctatgagtctccctctgtcgcccaggctggagtgcagtggtgcgatctcggctcactgcaagctctgcctcctgggttcacaccattctcctgcctcagcctcctgagtagctgggactaccggtgccccccaccactcccaggtaatctgtatttttagtagagatggggtttcaccgtgttagccaggatggtctcgatctcctgaccttgtgatccgcccaccttggcctcccaaagtgctgggattacaggcgtgagccaccacgcctggccgtgtgtgcatttttatcttctcaattcgactgtaagctcctagagggtaggaacattggcttataatatattctgtcctctggaaggcctggcagatattcagtgttcaacggtgtgttttaaataaatataatttcctggaatatcatttaataataagtagtgaaagctgggcgcagtggctcacgcctgtaatcccagcactttgggaggtggaggtggacggatcacaaggtcaggagttcgagaccagcctggccaatacggtgaaacgccatctctactgaaaatacacaaaaaattagctggtcatggtgtcgcacgcctgtaatcccagctactcaggaagctgagacaggagaattgcttgaacccgggaggcggaggttgcggtgagctgagatcatgccactgcactgcagcctgggcgaccgagggagattctgtctcaaaaaaaaaaaaaaaagtagtgaagaggatgtttcttttttgctctcatatttgaaacatatgatcaattggcttgaacattgtttatgataccactatgacatttaatccgtgttgaccaaataataaaaccagaaacaacaataacagtagtagctcacatagtgcttattatgtgctgggctgttctaaggcttgcccatgttaactcctttcatcctcttaataaacctgtgaggtggatgctatttctggtcccattgtagcgatggaaccaggcaggaagaagtccagtaacttgctgagagccgtggagaaggtggtggagttggaaggggcccccactctgagctgggtctcttggatctgcttcagtgggatctcttagcagaggtcacacatggacccagtgcttccctctttttctgtgtaaaatcacagtggtcatttactaaggatgcagagctctgatatgttgaatatgtttttgggaaagtgaatctgttaatattgtgagtccttataaatatttaactctctgctctttatgactagttagtaatttcctttgtaaaatattacttcaacaataaaagtgaactcttgagcatggggctggtgagggcatttccaaatgcaaggaagttactttgacatctccctggtggtgcccaggtacagacggtgggtaattaccagaactgttgctttgtatgatttccctagtcaaaggcttaatcatttgacagtatctaacccagtgttattggataacataacccatggctcttgactgtgctaggtatgaggctggtgttttctcagcagaaccagttaaaataaaacctagatgtcatatcccaatctggcctgtttgggaaaatgcagtttgaaccacaagcgcaatctacccgtggtgttttataacactgtttgcttggccagtcttcttcagcaggccctgaatatcttgtacttctctccctggtaacaggatctctaaaccggccacacctgtcataagtgactctactaaaggggaattcagaattccactggggatacttagaacagtgagctgatgtgatcttgtgttattttccctttcttgggggttatcccttgattaattacctgtctgttggagagagagtgttcttataattggggtgaacaggagggctctagtgggcaccccggggtgagggagtgtggggcattgcagtagaacctaggcagcgcttggagccagccctactggctatctgggcaggccagccctggaaggattcccatcttctcaacgggagtgcccgtggcttccatgagttaccaagctgggaattgcttctaacaatcgagttggaggcggggtgcccgtggtacaatctgtgtctggcttccttggcaactacctcttgtcttgtttcctgcttccagtcaatgcctttaggattaggctgaactttccccttcattgtatgtctcagcgtcaaagagaggacagagaaggaacatcttgttgctgtcttacttgaaataccagataagttcagggttcaataaaggtgagaccttccttagcttatttgaaggaactgctgttagtctaattcatgatctgtgtctttctactgctattttggtggatttgtggattggcgtccctggtccagaagagttttattatcatcctcaaatagtccacattcaaacaaatcccttttggatcacagaagtgagatttttttcctttaagctgttataatgagtgaggcccaggtaagggcagtgtcctgccgtggctgcaggtgtctgggtttgcagagggcctgaaggagtggcttcaaacaggacaatcctgttcatcgtgtgggagaccctgtgggcaaggagatgggttttatacggatgaggccactcaaggaagagggaggagagatcacgaggaagggctagttatttagggccggtcccaccctccagtgatccggcctccccctgtgtgtctctccctaccttctggctgcctgtgtcctaactccacgtcctgtttgctgccttccccataccagaaatcctaatatccacggctcagcctggccctggttcctgagagatgtcttgctgtgtagctctgtggtggatgttgtagacagtgaacggctctctgggcacaattcagccagtctctgttgtcagtggaagcagcacagatcttccctgcaccgtgtggccatttgaaaacaggggtgcacttgacaactccaaaaaaactaaggtagactgtctttacctgttgtttctgtgaaaggatctggggagaagagagggaaaaaatgaagtcatagtttcagagccatatatgggcctcacttaatggagtgagtgttggggccagatttatattgggaaggaaactatcttggtagataagaagtgaaaattcttgctggtgtgaccaaaaggctgggacctgtctgttgacagcagagaaggcaagcgaagggtcatgtgtagcacgttctcaggcctggccttggggcctgtggagcttccatgcagatccggtggtcacagatagccttactgttcctttcccccctcagtccctctctgtctctctctccccggtagggttcaacatacacatatctgtgggtgcaaatacatgagcagctctgagtcagtcttctttccctcattgttgtccccaaagtcccacagtcttttgtccttctcggagaccagttggattcagcaccctgtgaggcctggggttcaactcaggacagctgtcggggaggcagggagtgggacctgggccgctttctctgagccagtccggactgcagcagaaccccagtgactgtcccaacaagaggccgggacagactcatctcctgaggccccgtcgtcaggcaagaaagatgggcttccctgtggcatgtgtgttttccctcatcactgtgtggttagccccagcggggatataaatattgtccagatgctcactggttaatgttttacctcgcacaagaatgtgctgttcccaggcagctgtgtgtcatagttacagtctcctagagggcttgtgcgtgtgtctcctggagccgcggctggccctcaccccccatgcagcctccgcgaggccttttgtgcagagccttgcccttgtgtgtgccctcctactccatctgtatcttgtcgtcagttgctggcgccacctcagcagggtttactgtgacctttcttgggcccatctgggaacagtggtagtaggtctggacctaggggtccagtgggtctttcccacaacctagcctgtgtaagaggctggaggaaaccctgaatgcaggcagagaagtctgtcacagaggcccctggggacagtggacgctggctctgtgggccgaccaaggagcgagaccagctggagcatgtcaggggatggtgggtgtgattggagaggagggcggtcacagcaggtgaggttgtgtccctctcctaatatgcagggccagcctttgaagttcatttcttcagttcaggtaaagtcaatacgattgatttctagacctatagacctatgtgaagtatctcaaccaaagagatgtttatctccaacctaagcatagctctattttatttctccttttgttttttggaatcattaaagataaaactactcccagccattacaactgtcatgatgacataaaatactgcatcagaaatagtaaccagggtctttatactgttgtttatttcattacttggaatgaaaatgacaatctaaggtgaagagatggacttggtttgtctgaaatagggaaacatctaggtgtagattttcagatctcacaggggacaaatttcttcatctgcagaggaggaaataaacaggatctgtgtagctcttggatgaccagctcaatacatggatgctggaggtgaagggagctctctagggaaagtttgatggctgcatttttttgctttctatactctccctgtcactacgaatatggaagtgtttttcgaagcctgttctacttcctaaaacaccttataatgcttttccttttaggaggaagggaggcctggaaccaacctgggaaggcactggggagacccagggaggaaggagactgtggtcgccaagcatggtggctcatacctgtagtcccagcactttgggaggccaagctaggggcgctgcttgagcccaggagttcagtaccagctgggacaacatagcaagaccctatctctatacaaaataaaaatttgccaggtgtggtggtgctagctactcaggaggctgaggcaggaggtttgctggaatacaagggttcaaggctgcgatgagctataattgcaccactgcactccagcctgggcagcagagtgagacaccaacagaaagaaagagagaaagagagagagagagaaagaaaggagggagggagggagggagggtcggccatgaagactttatctatatagcgagggtaacagacagcccaggtgtagagagtccagataagtgtctcgatttttccacgttggcctatgtttttaaatggaaacgaactctgcagacctgcccttcattagaatctgaatccccaaacatctttctcatgtttaatctctgccattggttcatgggctgttaaaaaaaaaaaggggataatatccatgaaggctctcttacacaggtgacataaataacttttttttccaaatacagctgtgacaaaactgagcaattatatccatgcatagaatgagtgagaaagacaggagtttgagtcccaactctgccacattactgactgtgtgatcttaggcaagttacttagactctgttttttggtttttctcatttgtaaggtgtgttttggggaaacagataacaaaagggatgttgtaagaattaactgagatgggccaggcacggtggctccggcctataattccagctgtttgggaggccgagggggatagatcacctgaggtcaggagtttgagaccagcctggccaacatgacaagaccctgtctctaccaaaaccacaaaaattagccgggagtggtggcatgtgcctgtaatcccagctactcaggaagctgaggcgtgagaatcacttgaacctgggatctgaaggttgcagtgagccgagattgtgccactgcaccccagcctgggtgacagagtgagactccatttcaaaaaacaaacaaacaagaaagaattaactgagatgattcatgcagtcaagcattagcatagtgtctggtagatagggtgcactcagtggatgttagctattattatgtttgagacagtatagtatggattggtacaagtgttggcctcagctctagctgtgtgactgtgggcaaataaccccgagtctcagctacttcatctgtaagatggggatattagttgcatctgcatgaaagagtggctgtgagagctatacgtggcagggcttggggaaagtagtttaatgaaatctaagcactgtaagatttaatgcttccatgtttcatccagcattatataaggaactctgcacatgtgggtacatctcatgagctcctcagtttgcctcctgttgttttctctgatgtcagtgttgtcatagctgttcttggaagagttgttttaggcatgtgtcttgaggtccttcctgtggtcactttagtgggtgacacaggagaggcagtctgtgaagctccctaagagcatggctggggtgggggcggagtgaagggtgaaagcctcagattgtgtgactttgaagggagcctggagctgagttgtttggagagatgatttttcttgctgaatgatgaccctggactacatcagcaggtctgacaggggctctagacaaaataagagacaatctggtacaaatctgcatagttgctggaaaaattagtgtccacattcttcttacagtgcatccaaaataaggacccaatgtcaaagtgtaggcttaactggatgagagaaaggtagagaaactacagctcctccctcaggtcagatttaaattgagtggttactgatgtcttttttaaaatgtgaaatttagtggagctgcctttggaagtgtggtatttatccccgctttagtctgtctatccatagtggctgggagcttcaggttaggctggcattctatgaggtgttcttggtaaggattagctggcctggagtctcactatgtcaccaggctggagtgcagtggcgcgatctcatctcactgcaacctccacctctcgggtttaagactctcttgcctcagcctcccgagtagctggaattacaggcacacaccaccacacccagctaatctttctgtagaggttattattattcaagggtgtttttcaggaagctggtggacagtggtgggcatttctgctctgggattcaggttgtccttagaggagaaattctaatgatctggtagaacattaaaaaaagttctcgaatatttaattattagctatcaatgttcttttctgctgccctgtctcttcgcttactttatttcttgttccccaagtaatccacttctcaaattggctccttgcacataatgtttttttaaaaaaattttttgctgatatcttaattagggaaaatgtcagctctgcgcttagccttcttgtttctaaacatagtaagatgcctttgtccttccccttaattgtacttgctgcagagctaagctgttaggtttgctttgagtgtgtgtgagccatctttttgacaaacatagcatactttttgtgtatatgtgttaagatctttcattaaatgtgacttgatttatttatgattttgatctacgacaggttttctttttcattgcttctcaaatttgccttgaaatagaattacttactgcagtaaatgatttgcagtatgtttatccccttcttcttcgtccgtagcagctgctagttgaagtgggaaataggattcagtggtggaataagaattagttttttttggatatgccaaatttcaaattgactatatagctaactaacttgtgtgtaaaggatatttaaaagccataaaacttaatcttgtcatttgactaaattcagccattttcatgaaattggtatgcatttataattttcatgttatggtcagcagaacagctttagtctgtgtagtggtcatgggcatgcactctgtatccagacctgccggctttgaatctggcctccctatttccaagctgtgtaccgtgagacaaattattcaacctctctgttttaattgcctcaggctgctataacaaaataccatagcctgggtagcttgaacaatatagatgtgtttctcacagttctggaggctgggaagtccaaggttaggatgccagtagattgggtatttggtgagggcctactttctggtttgcagatggctgtcatcttgctgtatcctcacatggaaagatagagatcatccattcatgaggcctccactctcatgacctaataacctcccaaaggtctcacgtcctaatgtcatcactatgggggttagggcttcactatgtgaattttgggggacacaaacactcagtccatagtagcactctctatttgcttaactataaaatggggataataaagacatggacctaccttataacgttattgtgaagattaaatgagataatacatgtgaggtgcacagtatagtggctgttaccaagtaggtacaatagccagccatgctttgcttagtgatggggatatgttctgagaaatgcatccttaggtgactttgttgatgtgtgaacatcatagagtgaactacacacgcctagatggtacagcctacgacacacctaggttctatggcacagcctattactcctaggctacaaacctgtgcatgtgaccatcctgaatactgtaggcagttgtaacacaatagaagcaattgtatatctaaacacatctacacacagaaaaagtgcagtaaaaatatggtattttaatcttatgggaccactgctgtatatgtggtccactgttggtggaaatattattatgctggaaatccataaatatccacttggcacaaatagtacaaatattctgttgtttttttaattctatctttcatgattgctatggcaaattagacttttcatatttgaaggggatttttttttttttagtgagttatctcggactgttagcaagcaattctggctgatgttagtcataaagtttacttgaattttctttagtacaatcatccctgaaattataaagaggaaatgagttggtcaaaacgggtatgtaaattcaactttattgctccacctgtacaaaaaggaagtagaataaaaaataaacatattttgtgttaggacttcagggaaattcagtgttcagaaaaatgcttccaaatgtcgtagtacagagaaagttattatgaacctggttaacatctgactgcgggttctaccaagtcaccaaactgggacatttctttttttttttgagacgcagtctcactctgtcacccaggctggagtgcaaaggtgcgatctcggctcactgcaacctccactgtccgagtttaagcgattctcctgcctcagcctcccaagtagctgggattacaggcgcctgccactgcacctggctagttttttgtatttttagtagagatggggtttcaccaccttggccaggctggtcttgaactcctgacctcgtgatccacccagcctcccaaaatgctgggattacaggcgtgagccaccgtgcccggcccaaactgggacatttcttaagatgagcaagtgaaacaaaagtttcagtggtttatatagaatctcatgttgatgtatatttataagcatgtttattttaaacatctgagagaaacagcagagacttgctatggtgtaacgcttactttccgacagttcacatatttcccaagttttaaggagttcctattgatggtaggtgagtgattcttttggtttttgaagaaggattagttgtgacaaccccgtgagctaatcaggcaagttgaatgttattttattctctgtcatagattcagaagttaatatgtgggttccttagcaactaatttgcaggtgtagtcacacatccaagtgcgcgtggagaacgagtatcccaggtaggatgtgatgagagcataggagggactcagcctgtgaccaatcatgtctttgtgcttttaaggcacaaatggagcatggaggggccgtctccatcataccacctcctcttgctcctaggcgagcctaacttcctttggaaggggatatccagccacctcctggtagatagtatctggcacgacagtcatatgctgcacaggtgtgtggactaggagcaataggccataccctacagcctaggcatggagtaggttgtaccatctagattgtgtaagttcactctgtgatgtttgcacaatgacagaatcacctatggatgcatttctcagaacatatcccttttgtcccctcccccaccccatcctcttcatggccacatgttgtgttttgtcgttactatacctatatcttggagacagcactttttaagcatattttggacttctctctgccaaaaatgcggacaagtggcctctcttttgccctcagtgggtccttactcccagtctgtctagtttctccccttgattgaaagcctccttgagagcagccaccgcatgattttgtttactgttgtgtcctggagtgtaagacacagtgccttacacagggctggtgcccagaaagatttgtgaatgagttggtgaatgaatgaaattatctatttgaacaaaccaaagctggacacacatgggtagccgtatagcctggctgagatatgcttgatcatgaagttatggctttattcatctgttggcagtgggattgactaattctcccttcactccctcatgcccatggttgggcagccaggaccttctcacctaaacataccatctgttgttggctcctggctatcacatttagttacaggtctttcccccttttaatttccggctgttattaactatcctctatttctgatgtagtagcattctcacttcctgcttttcagtttgactgggttgcaacgggtccattatttactcaacttctttctttatcgatttcctcatctataacatgtcaacaatggtattgcctctcttacagggtagttgtgaggatgaaggggttaaatgcaggtgaaacccttagagaagtgcctagcagtagtcagcctgacaccgaccatgtctcatgaaagtcacacagacctgcaaggctcctgcaatctgccctttactctttgcccttcccagctacctcatcgatttcctgactgctcgtcttgccatggggaccatccttgcattaaccacaggaatttccagcaacagtccactaccatattcctagcactgagcatagagtctgacagatgatgtgtgtgattggaagatgctgtgtttctgcctacccttggctgctgggtgcagggctcagggctccacagagtgaaggctacctctgcataatagctctgcggcctccctgtctgtattaggaagctgatgatcatttattattccagcaagcagtgacaaatcagctctgtgtgtcggtgaggataggcgaggctatgttacactcaggagtgacccaaactttcagtggcttaaaccgagcaagtcatattctcactcgtgctgtgtagcttatattggctgatgtaggggttctaccctcaccatcactcagggacctaggctgctgaggctctgtgtagacacatgtggccatgactagcaaggcaggcaagggtcaggcgtggcacctatcggctcctaaagcctctaccaggaagtgcacacatcacttcacatcagagttcactgggcaaagcaagtcccttagtcacacccaacttcagaggggcagcaaagcccagccctaccctgtcgctggaaggaggccaccagaatattcgtgcctggtctttgatgctcccgtgaccaaggatgggtttgcgataaatggagtggggccccactgttctcagggcttctaaaaaggaatgccccttgccacatctccaccctcagttccgataattaattgttttatttaatcagggagaaaagacattaattccaggaagcttagcaaacaggcggttcctctaggtatggtcttcaaaagccctcaggagcaattttcccatccactttgaaggatataattccactgttggtctgaagagcaaatgccctgcgtaatttagagctgggcctcagaggggagtgtgttaccggacagtcccctcagcaaactcagttattccactgggcttttgctgagccctgctgtgtgtttggactttatgtgaccttcaatactgactgatccataggcttgtcattgcataggtgagctccacatcctgtcaacttgattttgacaatctgaagctggaaaagctttggggagcagcgcctctgcacactgtgtcaggacctgggcttccggggctccagagtggttgataaacatcatggcggctcagagagggagaagccaaccaacagtgtttgctagaggccaaggtggggtcagggcctgaggcgggggatgacctgaagctggggacggcctggaccagtaggtggctgactcaaagactgagcactgagagcctggggaagaaagggggagaaagttcaggaaatggataccagctgggggtggctgctaagaatgaggcaaagctggagaagttgctggggtccaaccaggaggaccttgtgggccaagccagggagtcagaattttcagctgagtgaggagccatggaagcagtggtgtggggtggtcaggtttgacttttcttttaagttatgcttgacttagtcttttttttttttgagacggagtttcactcttgtcgcccaggctggagtgcaatggtgcaatcttggctcactgcaaccttcgcctcctgggttcaagagattctcctgcgtcagcctcctgggtagctgggattataggcacctgccaccatgcccagcaaatttttgtatttttagtagagacaagatttcattcaccatgttggccaggctggtcttgaactcctgacctcaggtgatctgcccaccttggcctttctctttctctgtgtgtgtgtgtgtgtgtgtgtgtgtgtgtgtgtgtgtgtgtgtttgcatgcttttaacttcaacttttaagttcggggtataagtgaagttttgttatatatgtaaatttttgttatgggagtttgttgtacagattattttgtcacccaggtattaagatgagcacccattagttactttttcctgatcctctccctcctcccaccctctacccttaaggccctagtgtgtgttgttctcctctgtgtgtccatgtgttctcatcttttagcttctacttttgggaatgtgtggtatttggttttctgttcctgcattagtttgctaaggttaatggcctccaactccatccatgtttctgcagaggacatgatctctttctttttatggctgcgtagtattctatggtgtatatgtaccaacttttctttatctagtctatcattgatgggcatttaagttgattccatgtctttgctaatgtgaatagtgctgcagtgaacatacatgtgcactgtctttatgatagaacgatttatattttttgactacaggatcttgacaagatttacattccttgaccacagttaaatggtacttgacttagtcattgttttttattttttacatgctttacttcttggcatgatttgtatttctacaactgattggttttcacaatatttgttttaatcccaaagatatatgttacaccgaataaccacatcacatttaatctgatccttttcaatattttttcactcacacagaagactcaacaatgtaaaaaaactgaagtagaatattatattctaacatagttttagtcactgttggagaaaggtctgtttattatcagggtttctttattttattgggtggttgttctaatttgttgttttgtcaaaatttaaccttgtatttatgtgcttaaaacattaaggatctctaatttagaacagattagtcttctggattaattagtcttcttctagatttgctggtttgatggtgaaataatgtattttcatgaatcttcttttggtaatagcttaattaaatgatcagacaaatgtttatacaacacattctaaaatcatacattttgttcagaagagattgaaggtgaattggaattttaaaaagacccttctgtgctcagggcatgccttcctgatgggcgggtcctgcggaagattgatcggtgtgggaacagaagaacaggaattaccttttttttttttttttttttttgagacggagtctcgccctattgcccaggctggagtgcagtgaagtaatctcggctcactgcaagctctgcctcctgggttcatgccattctcctgcctcagcctcctgagtagctgggactacaggcgcccaccaccacgcccggctaattttttgtgtttttagtagagacagggtttcaccatgttagccaggatggtcttgatctcctgacctcatgatccacccgcctaggcctcccaaagtgctgagattataggtgtgagccactgcgcctggctaggaattaccttcttatgggacattttttcttacaggattttttatttttttatttttaattttttaattattatttatttattaattttttagacagattcttgctctgtcacccaggctggagtgcaatggcatgatctcggctcactgcaacctctgcctcccaggttcaagcagttctcctgcctcagcctcctgagtagctgggatcacaggtgtgcgccaccatgcccggctaatttttgtatttttagtagagacaggattttgccattttggtcaggctggtctcaaactcctgacctcaggtgatctgcctgcttcagcatctcaaagtgctgggattacaggtgtgagccaccgcacctggcccttacaggatgttgtaattaacctttgttcactcactaaattcctccttcttgtaagttcttttttctggacagcactgagatcaatccgtgagggtctgtgtactcccttctcctcgaaagcaccaggtgaagggtgatgcatttaaactatttgatagcactctccacccctcacaccccatttcttaatctatttctgttgacacagcgccaccccagacagggatcataatgcaatagagcagatgtcagtgttccttcatgacttgctctacattctagtcccatttctcagggccactgttattggatttgagcgagagtctagcctcttgattggataaggaagacacctggctatccttgattgcatttggaaaacattctgctttttttttttgtggaagattgagaaatactctagtctcatcttcaatatagtatcaagtcatcttttatgttggaggctttctgttgatggctaaactcgtcattttgatattgattgcttttgcttttctttcggtagagaacatttctgactttatattctaggattgctcccatttgaaaccttcgaaacctttcttcagactgatacagaatgctttattatcaagcacacctctggataaaactgtggattccttggcaccaacagccacagtttggaatcttgaccctgagtagttctaactgaatccagcagcttctactcacctttctgttcttttaaatgggtcacataaatctgtcccccaaccccccaacacagaacccctccaggcatctacaggagggtgaaagctgatggtcacccttcagcaaggctttcttaggtgcgtagcctgcccttgattccaacttgtaagttaaaggtgagaaaaggatgattttggtcaaattctcccttgatgcctgacccagggcaaaccatgtcacctttcttatccttctgcatgctatattttgaggttctgtctcatggcttaaaatgctgtctatatactggtgaatcacaaatgtatatctctagcctggacgcgtttatgaaactttattcttatatctccaacttcctcttcaatgtctccacctgaacacttagtaagaagctcagccttagtatgcccaaagcccagcccctgatcttcaaccccacttttctccacggcacttcctccccactttatgcatgttaggaatggcaactttatcctaacagttgttcaaggcagaaaccttaaagtcatcctagatctctgtattttgcctttttttttttttgagatggagtctctctgtcaccaggctgaagtgcagttgcatgatctcagctcactgtaacctccgcctcccaggttcaagcgattctcctgcctcagcctcccaagtagctgggactacaggcgcatgccagcacacccagctaatttttgtatttttagtagagacggtgtttcacaatgttggccacgacggtcttgatttcttgagctcgtgatccactctcctcggcctcttaaagtgctgggattactgcggtgagccaccacacccagcgtattttgcattctgtagtcaatttgtcagcaaatcccattggctctaccttcaaaatagacccagagtctgtccttctctaccttggtccataccactaagttctcttgcttgtattacttttgcagcccctacctgccctcccttcttcctctcttgctccctatcctcaacccggatgccagagtgatcccgttaatataagtcaaatggtgtacagtggctatgtctttacactggtctgtaccacctgtgtgatctgactcccccaccctacccacacggttacctctctgatcccctacttctttgcccttcactctctctgctcccgacattggcctccttggtcctcacatgttttctcctctgggctctgcagcttactgttccctctgtctggaacgttcttctacatggttccctccctcaccttcaggaccttatcatacgtcaggctcccagtgaaccttccaggatcaactgttgttgaaatggcagcagcctccatacttcctggctccttttcctgcgttgcttttccctgtagcacttatctcctgctaacattattttgcacatctaaaagctaggagtgcaaagattctgtcaattttgtttcctgctctattcccagcatctggaacaatgcctggcatatagcagacattcaataagtatctgtggagtgattgtatccaccagatgttttttactgactgtgtgcaaagaacagttctcgaaattgggagagacacaagtacatcagatgtgtgtatgtctctcagagcatccgcagcagtgtgacagagggcaaggaccataacacctgctcttagaatcttcatttaagcaccatagatccttgattgaatctggaaaacactctgctctccttgtggaagattggggaaatattctggtctcatctgcaatatagtgtcaagtcatcttttatgctggaggcaatatagtacctgtatatttaactgcttggtagtggatgtttgctattctttagcatctcagagagtataggggaaatctgcgtgtttgagtacttatgcacattgaatgtggttattgacatgaaattcaaaggtgagactttaaaagagggagaccttaccctgctgactattcatgaaggaaatggtttcaggcaatggagtggtctctgaactgggatttgaggtgtagatagggaaagaagagggttccaggtacagattactgtgtgcacagaggctggagcttgctgactcagtgtctgggaatgagcaccattccagattctgtttgtttctcaatgtctccctaaaggatactactgaatcctcttctcggagtcctcacacagcatgaaattccatgcatgagatttgattggctgcaggtttaggctggtccgttttgacttttcccattcattctgtgggcttgatttggatgccgcctgggctgcctggttattttgttgtctctaaattctggcccatattatttgtgttgtacttgagtctgctagagcagtggtccccaacctttttggcatcaggggctagtttcacgggagacaatttttttcacagactgggggttgggtgcagatggtttcgggatgaaactgttccatctcagatcatcaggcattagattctcatgaggagcatgcaacccagatccctttcgtgcgtggttcacaatagggtttgcactcctatgagaatctagtgctcccactgatcaacaagagacagggctcaggcggtaatgctttcttgcccatgttcacctcctactgtgtggcctggtcccaaacaggccatggaccagtaccactgtgctttaaaggaaattcagactggcaaattacctatctgctccaggtatctgttgttgcatgccacaaaacaccccccaaatctcagtagcttaacacaatatgtgttattatatttcatggttctgggggttgataggactcagctggatggttccctcttgggctctcttacacagccggagtcagatggtggctgggtctggaatcatccgaagactggactgggctggttttccacgatggttccttcacctacaggtctggcttcttgccctctctgtttccacacagtgtctcatctttcagggcctctcatcttttgggactggtactagtccatggcctgggtcttgggacccctgtgctagaggatgacatggcacagtcacacatttggctgaccttttagtgggagggagatagaccctggaatattctgagtgatcagttctcttttcccagttatctttttcttactctgttgtttaagtacagagtataaatcattttttgtataggctgttcctggcagatatgggccaagctttgattcatagagagaaggaagcttagacgttaccaagaccagtgcttcccaaatctcctgattatccaaatcaccgagggagctttaaaaagtcactcaaggcttgtttaatcagcatctccaggacacaggaagaagaaaaagaggaggaaaaagaggaggaagagacaaggatgtctcacatgtgagaaaatctcagagactgctacactagatggaaagttgcctatgtcagtggtccccaaatgccacactactcagaaagacaggaaaacaagaaaaaaagtacattttctttattagaattggagtgtgtagatgtctgtatcagagtctgcattttcaaaagaatttccaggagtgagtaagagaaaggaagatgaagaagaagagagctacgacgggaaagagatcggaaatgagaagatggacttggcttgcatcctgcagataatgagtaaatgctgaagtcctcgatggagggccagggctgggagaaggggaggagggaggggtgggaggtagctgtatacatctggaggagggaggggatgacatctgcctctgctgggtcactcagatctggaatgtccttgcaaggaagcccattctgattttgaacagctgctcttgataaaagctcattccccatttccttctaccattcataggatgtagctctggagccccctgtcctaagcctccttatcctggcttccatccacttcttcagcaggcatttattgaatgcctaatgtgggtgacatggtttggctgtgtccccacccaaatctcatcctgaattgtagctcccataattcctgcgtgttgtgggagggaccctgtgggagatcattgaatcatggggggcggtttccctgatactgttcttatggtagtgaatgtctcacgagatctgctggttttgtaaagggaaactccttttgtttggttttcatttctctcttgctgctgccatgaaagcagtgccttccgccttctgccatgattgtgaggcctccccagccatgtggaactgtgagttcattaaacctctttttctttatgaatacccagtctcgggtatgtctttaccagcagcgtgagaacagactaatacagtgggcatggttttcttattttgtttttttctctaaatccctcttccatttctgttaccttccacttatcccaagaaatggttacttaacaaattcaaaacacttataaggatttggacacagcttgagccaagatttatctttctttggcaacccctgtttgttttgtctcttgagagtatgtacaaaatgatactgtaaacaggattttaagtggcatgtgtaatttagtgaagagaaccaaataatgttctactacaatttgtatgccaattataaatcatgcttttccattaattaaaggagtagctctttgattatctaccagtaggatgcaaaaatgattaaatagtgttttatttaaaatattttacattttattaaaccaccttggcttctgactactcctaactcacctcgcctttagcacaaacagttctgtccttggtgaatctgataaaatgatttgcttgttcagctataaaacgtaaaagaggctcttataatttgttgcatagtttaagaccctgttttgtttgaccactgcttgggggttgatgtttgttattctttagcatctcagtgagtaccggggaagtctacttgtttgagtacttacacatgttgaatacaattattgacactgatttaaaggtgagattgactcagttcataaatatgacagttgatccaggaggcattctgtctggaataaattgataaaggcaaaagttataaaaagaatatgtgtctgcttttgctttgtactttacttacatacctagagcagttactagttatagccttttgaatataacctgtatgaccatcttcaaatctgtctcaatttcaagaggaggttactcatgcaattatgtgggttactcttattcttaacttgaacatttcagaaaatgagttttatggtagttttaagcctaagcattttacatggcagagagctccggtttattcactcaataacaaattgcagtatatgtgtgtgtgtggataccatgttatacatgggggctaaaaaaataaatgaaatgcagttcctgccctcaaggagctcttagtttgctagtggagacaactgatacacatctggattgacatgttttgtttttgagatagagtgtcgctattgcccaggctagaaagcagtggtgctatctcggctcactgcaacctctgcctcctgggctcaagctatcctcccacctcagcctcctgagtagctggaactacaggcacccaccaccatgcctggctaatttttgtatgtttatacagatggggtttcaccatgttgcccaggctggtcttgagctgaaagtgatctgcccaccttggcctcccaaaatgctgggattacaggcatgaaccaccatgctcagccccttgttttgtttttttattgttgtaaaatacacataatataaaatttaacattttagccatttttaagtgtacaggtcagctacattaagtacatttactatttttttttgcaaccatccccaccattcatctcccgaactttctcatcttcccaaactgagacactgtgcccattcttgatgggttttaatatgcctaggaccacagagctatgggaggccagaggacaggaaactcccagttctaaggcagtgtcaggtcatgggcagtgattggcctgaatgccccttgcccatcttctgctgtgtccaaggactgaagacctgccactctgcagcttggtcgctgtctgggctgaagaacctgtctcagtgagtgggggactgggattctcctctcttgtgtcagagagactaaaaccgtagttctgctagacctctcacccctttctataaataggagcatcaatggggccttccaaaggaagtcattgcaatacactgttgttaagccttctgagcttctagctgtactgcctggaacagcctagaaactggcaaagatttatggtcattgagggcaactgggcaacaataaatcttcagccctgcttgcctttatagcatctgtgtaagcttgctggttcagagccactgggactcaaagtaaatcattcagtcagtcactcagcagataattatggaccgcccactaggtgtgagacattctgtttctcctttcttttatgtcaatatttagcagaagtagtagcaaggcatccaattcttgaatctagtttctcttctaaggactttttttttttttgaatctctaaggttgttttgagtatgttctcctcaatccaaattgttccctgctcaggagaaaataaagctctggggagaggcttaaccatttaatcatgtaccatttaacacctctttctgggaatggaaacatagatcagcataaagaacttgtcccattagtatttgccaccgtttttcctttgaaaagtaaagatgtgtttcaatcacttcatttgttaaaattaaagcatggcctctccttctccctgtccatctgctgtgacttgtgatctgatttgagtgtctgttctagtagcagaagcagcagaggtagatgagacaacaatttactgcctcagtggaaacttacttcatggccgagtcagaataacacagttggagtttttaaaattaattggaattttattctacactacttgtctggagtctaagctacaaagctgttgttgtaaaggtgaaaatctagcctaatcagtgccaatggcatttgcagaagatgccaagaacttcctgggtctcaggaaggctggaatgtacttgtcctcccttctccctccctccagtaaacacaaccttccaccctcccctcaggctccagctgctgcttgctgcacctctatagatcccgagtttgggaactggctggagtctctgttgaaggactggagaaggttacaaggattgtctctgcccctgcctacctcaggcctcccagaggtgggggatgagggagtctgtggaagaggaaagaactaagggaggagcccagtgtgagaggctctgctcccgcctgcggcacttccctgcacctgccacaggtccaattcatgggaacagctggactttctagccactgtcgttggtctaggaagttaaactgtgggcctcttacccaccgcagtcactccctggaggtggcctcagagctctggctccagagggcacctgtcttgcatggagaggtaagaaatgtttgagttgaactgaatattcgctgccggcctggggtcggtgagattagtgagaagggaacaggtggcgtaaaagctaatgggatgctttaagattggcacattgctgatttccaggctgccgtgggaaggctggtggtgggtatccaggttgctgtagcggggtggagagaaagcacctcctgttttccaatgtggaggcaatctggccatgacatctgtgtccctgcccgccacggtggaggagggcctggatgcccggctttgtgtgcccctggccgccacggtggaggagggcctggatgcccggctttgtgtgcccctggccgccacggtggaggagggcctggatgcccggctttgtgtgcccctgcccttcacggtggaggagggcctggatgcccggctttgtgtgcccctgcccgccacagtggaggagggcctggatgcccagctttgtgtgcccctgcctgccacggtggaggagggcctggatgcccggctttgtgtgcccctgcccgtcacggtggaggagggcctggatgcccggctttgtgtgcccctgcccttcatggtggaggagggcctggatgcccagctttgtgtgcccctggccgccacggtggaggagggcctggatgcccggctttgtgtgcccctgcccgtcacggtggaggagggcctggatgcccggctttgtgtgcccctgcccttcacggtggaggagggcctggatgcccggctttgtgtgcccctggccgccacggtggaggagggcctggatgcccggctttgtgtgcccctgcctgccacggtggaggagggcctggatgcccggctttgtgtgcccctggccgccatggtggaggagggcctggatgcccggctttgtgtgcccctggccgccacggtggaggagggcctggatgcccggctttgtgtgtccctgctgtggctgcgtggttgtcaggtgaccatcctctccagggaggggagagctgccccttgctgagggagggtgtgcatggcttgttcccctgccagaatgtcccattccttgacattttgaccagtcttgccacattctatgggttaagacctggatgattacaaaagttgtggaagatggttttcttgacggtcttgtttgcaatggaggtgccagcaggtgctgagaaacactgagggacctcagcaatgccatctgttctcagaggggctcaggagaagcaaagatgagcagtggccgaggaatggtgccgctgacatagtccgggcagccccgctggcacttatgctgctgagcttggcttccacagccagggaaaagggtgtctttctgtagcagccatctgcctcgctcatcatcagttgtgatgattttgtcttacctgccaagtggtagttcttacgtcttgcagatctttgaatcctcagcacctagcacagtgccctgcctgcagtaggggtaacatagccaggaagcacagcatgcacgattgttttctccaaaagatgtgcagaaatcagtgaccagacagaagtggtaggcttcttctttttttttttttattgtcaccatctataatggaatggcatcctttacttaaactcaacacctttggaagcactggctctcagaggctaatgcctgtggctcccaactatggtgacttgtgatacctcactcagatatgacgggtcagtggctttggagggggttctcaggaatctgcatttttacaagttcatgggggtgattctggggcaggtattttatgaatgtgaatcataacttgaaaaagaacaggctttcagctgaggcacggctatcattcgaatgtgtcccctccaaaattcaggtgttgaaatttaatggctaaaatgataatattaagaggtggccctttaagaggtgattaggctctgagagctcctccctcatgaatgagatcaaggcccctgtgaaagaggcttcatgcagcattccatttcaccttcctctgatctgtgtgaggacactgtgttctggagggtgcagcaaggaggcatcatcttggaagcagacacctagtcctcaccacacaataaacccaccagcctcttcatcttggactccagaaccaagaaaaaaatttctgttcatggtcaggcatggtgtctcacacctgtaatcccagctctttggaggctaaagtgggagaattgcttgagcccaggagttcaagaccaatctgggcaatatagtgagatgccatctctgcaaaatttttaacattagccaggcttagtggcacgcatctgcagttctagctcctcagtaggttgaggcaggaggatcgctggagcccaggagttcaaggttacagtgagctatgattgtgccactgtattatagcctgggtgacagagcgagagcctgtctctaaaaaaaaaaaaaatctgttctttatacattacccagccttttgtattttgttagagcagtgcagatggactaagtcagatacgctctggaaatggattttccaagtggggaataaacaacgaggaaggtaactctgtgtcatttccactttcttacacctggggtgcttcacactttaatttttgtcacacctcgtgtaatccccttggtactctttaacattaatcttgaagaacaccttacatttttggtagcattattgaaaccagttgatatattaatatttgagggcttttataggatatatatatatacacacacacatacacacacatgtacacaacacacacacacacaacacacacatacacacatacctgtaggatgtacaatgaaaaaccagttaactttctgaagtacaggattttaaatagactctatttgagccctggagattggcagtagtctcggctacccctcatggtgccggggtccgaattactcgcctctctgggacagctcccttttctccctcccttgtgatcttgcatccaacccttccttaaccaagtctgcagacttaggtttgtcctcaccctaaggtgaaccagccagctcctgttctcagtctggggagtgctccttttccactgctgagcagagactggagcaggagacacagtgatgcgtctcatggccctgcccctggctctcttccctttggacacacccctaggtgcagctgtggcctcctctgtaacaggtctgcagaagagcaagattagaagcagccatatcccctacatttgtaacaggagaggcccagacctccagctgggggattaacatgttctccagaaatggctagttactcccaaacttgcttctttcctccaagtcttcactgagagcctgaatccattcatatctgcctcacaaggagtgtggtcccctgagtgtgtgaaagctgtcgtcatcctctaagtttccatggagtttcctgggctccagctggctgtggataccagggcttgaatgtgttgggtgcctggagccgcatgtctgaagggctctgctctcctcccttgctgctccaaaagtcacggaagtcaaaagggagaaatcattccccagccatgctgcatcctgaaaggcacatagcacaagttgtaggggccatacattttgaggtcagattgtccaggtttggaactaaggaagcgatcggccctattgggcaggatactcagacattccatctgtaaatagagatgatgataatactcacctcagggaattgtttgttattttatttacaaaatgattatcggggtcatgtgtcaggcgctatcccaggcactgctcttggtcctccagtatggggaggcagactgagaaatgtgaattggaagagtgtggaaagtgcagcgaaagagaggtgcagggcattctaagtttccagggctgggaggttgacctcatcacaagtctggcgaagacattttgctttaggaagtgatggctgacacgagataacaagaagagtgtcctacacatgcacccagcacgtgcaaaggccctgtggaggcctggctggggagtgtcctgagggatcggaggagaccagcggagttagagctcagggagttggggtgaggcattgaatggagaggaggccgggagcccagcaggggaagccttccaggcagaggtaagactgttggtcctaagactggtaggaagccacccgtgagttctaagctggtgaatgacagatctgtgttcttaaagttgctactctggctacagagtggaaactgggatggcggaggcatgagggtgagtttatggaagccagttaagaggctcctgctatagcttatgcaaaagatgatttagctttcactaggggggcagtggaggtggtacaaagtgcaggttcaggagacggtaagccatagaattgacagttatggtgatggattggatggtggcgacagggagaggaggggtcaggagtgaagtattccatgaaccgtcacattgcctgcataaacatgcattacaggtaaacgattatggtaataatttacaaagaagcatgccctttgctctgctcatttcacaaggcagctctggttaaatgactttttattttggactggcctcattccctaagaccaaaggcagctgagcctgtgtgccccgggggcctgccctctgaccctggtgtagccttgcatcaagcgtgagctcctctctcgcctctctgctgtgtggtgtgaggaaggtagtgcaaggaatgttctagcaagtttctcatcctcatgcagaacatccctggtgggtgcccaccccacaacaaggcttgccagccttgagtctctgttaatctctgtgtccctcccctgtacccccactctgtcacgcaggctgggtcccacggaagaggcactgcctggctccggctggcttttcccagatcaagcccacacctccttgcctcaggctgtcctggtgtctggctttgcttctccctctctcattggcacccttgctgttcttaggtttgtccctttctcattggcacccttgccgttcttaggtttggggcaggcccgtgtcttgtcagcagcaaccctggctcctctcaaccaggagctggagtccccattgggcagaagaagcttcggccgactttgccgctcctttgccgccgggacagccctgcaggctcttctctgggagggtccccatggtgccctcccacacagcctggcctggtctcagggctgaagctgaggacctgggtgtgcctcagttggctgaaggtcattgtatgactcacacctggaccttttgcccagccctcggctgtaagaagaaccagcagagccagtcacaggaaggcctggccctcaccttcctgggttcagccaccaccaacacattagtcttggtcttttgttttgttttgttttaatttaatcacttaattttttaaaagcattttagatttacagaaaaattgagccaaaaacacagagaattctcatctacccctttctttctcctccctccagtccggttgtcctttttcttaacatcttgcattagtgttgtatcttggttacaattgctgagacaatcttgctacattattattagctaaagctcatcatttccattcagactcactctttgtgttgtacatcctgtgggttctggggttgtgtgtcattttcctctaattgggttttggcaaatgtgtgatgatatagatgcacccttataagatcacacaggttttctggcctgaaaattgccctgtgctctgccttagtcatctctctttcctcattggcccctggcaatccctgatggttttactatctccatattttagtcttttccagaacgtcctgtagttggaatcatgcgtatggcaactttccattttggcttcattcacttatggatctgcatttaaggtccttcgtgtcttttcatgcttgatggcccatatcagcaatggtcttttatactccaagtgcagtgtgtctgctcaccggctggaggccttgcgatgggattcacaatttcctctcagtgtcttccaagcggcttttccgtatcatcttctcaggcttctgtgcacctgcccgtactggacatatttggccattgctgatctaggagccttcccgaggcaggaggtgaaacggtctggatttcgtgttctgtgttaggaaatctaacactgcagcaaccccgaatgcctcagtcatgagcagttgatagtgcaggggaaccgtcttctctccaagaattggctagaacgggcttctgcccactgcttttattccatcatcgggtaatttgagtgtttccagtctaagagaattctgcttggccctaagcctttccactgcaaatctggatgtggaccatcttctatcagagacagctcaggctcaatccctaaattaatggcaagcaagacgtagacaggtgtgacttcttagagacaggctggactgctgctgctctgtccttgggtggcgccagcccttcctttattctttcccagtcttcttatccattgcctgtagcccaggaccagtgccaagcctgtagcttccgcatggtgttcctctcccttccggggatcttcatgtaggtgctgcacggagaaagaagggccctgagaagagaggctgctgtcggcacaggagccgtgagggtggcggccgcctggccactgtgtccagtgctttcaaggtgttctcagtgtcctcgtttatgccacggcttagaagattgtccttgccatctttagcaactgtctcagccgtcacttattttcactcgtcttacgaggaccaacctgccgactttctcgtcacgggggcattgttaacaaccagctgtgcgtgtttagtgttcataagcagagcaaagtgtgattgtctccaggaagctctgcatctgggtttttttgctgacattttcttttctttttttctctttgaatgctgtggttttgaacaaatcggtaatgtgataagtcttcacttaacgattttcaggcatcaggagtacacgattccctggaagagacatttacatggaatatttatttatttgaagaggaatcggatgtgcccagtcaacttagcacccactgaggtcctgtcaccatttgttgagtttgcacaacgtgcgtgggcatgattgtgcccgatttctatccagccccgagaattagctagcagtccccattttacaggtgtgggaactaagggttaggggatgcgttaccctgccccagctctcacgggttgtcagaggcagagatgaaactgaaacctgggtctgcttctctccaaactccatgctctgggcacaacaccacttggcccctacccaagggaccgactctgtgctgagaagcagggcagcctggggcatacacgggaagtcggaggcttcagtcgctttcttcccatgctgtgctctgttcaccagactccctagggtcctcccattgcaggaggaagtggcctcttgagccctttgagatcaaggctgggcatagaacacaacctctgctccaactcagagtcttttttttttttttgttaaactgtgtctggagcactttgataatctctccagagatagtcatttttgctaaaatgaattgctaaatgtaggggagagatttgggggcacgaactaagcctgccctgggtgccagtgatactggcaacttccctggtgggtgggaaagagaaacctgcctggtgggtgggttcaggacctagaaaagacctcctcagcctagttccttgttgctttgccgccgcccccaggcagttcagcctgggcttagtcagtgtctagcagcctcactgaacttctgggaccaacagcccctgggtacttctcttaccacctggtctgcatcgtcagtggctcacacacccatcacactggcctgctgctgctgttgcataggtgtgagcttggtacttgtgatcttgcaaagtgctaaatggctcacccaactacagtacctgatggagctcttgagataccagtttgctctctgaggtttggatcagcagtgacccagataagagttcgtttgtaagaacaaaatatatatatcatgcttgggaggctgaggtgggcggatcacttgatgtcaggagtttgagacaagtctggccaacatggtgataccccgtctctactgaaaatacaaaaattagctgggtgtggtggcaggcacctgtaatctcagctacttgggaggctgagcaggagaatcccttgaacttgggaggtggagattgcagtgagccgagatagcaccactacactccatcctgggcgacagaatgagcctccgtctcaaaaaaaaaaaaaaataatggaaataaaaaagaaaaagaaatatatatatcatgctactccctagttaaagccagtgtcatctcttcccagcttatttctgtggcctcttaactggtcttttcgcgtatgccctcctttctaacaggtaaaccataacccatcatgcctctgaaagaatgagaacccatcaatggcttttctcttgctcacggtacaagtcagaggctttacaggggcctctgagtctccacatgctctgtcccttcccccaccatggccccaactctgatacagtgaccccgggctcctggcagcttcttagacacagcctggcattacgtgttttcccttgatgctgtgtctttaatcagatacctttctcgctgagccttaccctgtcactgcctgacttaaaattccagcccccatactccctgtctcccctgcctaatttttctgcaaaatatttatcaatctttgccactgtacgtattgtacttatttgtttattgtctgtcttcccccattagagtttaatccccacgagagcaaatatttttgtcaattgtttattccttaaccctggcatctaggacagtgcctggcaggtagtaggtgctcagtaaatcggtgctgcaggggtttgcctggtgttctgagatcctgatgtagatgtgcctagttctagaataatctgacgtaacccgtgatgtgcatcttcatgtgtgagcactggtatttgttttacagtgttgatttgtgagacaatgccactcctgttcacttgtgttggaatgtgtcttcatgagcaggaggaaagggaggcgttctacacggggcatgaggatggtccctgccgggagctctcctctctgccgcagctgtcatttgcatctgcgtcagtgccccagaagtgaaccttcgtaggatataggtaggtcaggacctgctctcctgggtgacaagaaaggcgattcctgtaaatattatgtaaaacattccttcacttcaccatggagtcaatggagtcaggttcagtcaggctattttgatgtttttttttgtttgtttctgtttttgttttttttttgcgacagagtctcgctctgttgtccgggctagagtgcaatggcatgatctcggctcattgaaacctctgcctcccgagttcctgcgattctcctgcctcagcctcctgagtagctgggattacaggcacatgccactatcctcgtctaatttttgtatttttagtagagacagggtttcaacacgttggtcaggctgttcttgagctccagacctcatgatctgcctgcctcgatctcccaaagtgctgggattacaggtgtgagccactgtgcccggcctattttgatgtttttaaaaagggctttgggaggactttgctctctggctctaagcaagctttagccattggtttaactttaaaaacaaatgtgtattagggaaatactggtaatataggatcccactggaaaggcatatgcttgtttacccatgctacttctgtctaaggcccaaggtgaggccatcctaccccagccactctaaatggcctggccacctgtgcagatgggtgcccggtggggctgggccctcgattcgcatcaggcaagctcatctccatgccttgcgtgctccccagcttgtcaagcctccatctgtttcgttcttcactccggcatcccatgtaccttcctcaatctggatttggggacatgccctctggccttcatgagccacaactgtagaggatataagaaaatcaaagtttatttctctatttttctggagcactccttcccaaaacaggataaatacatgaagatgtaagacctaatatgtcttaaaatgtctatggttttttctctactcttgatagatagtctgagaatgtcttagttcattttctgttgctgtgacagaagactacagactgggtaatgtatacagaaaataaatttatttcttttagttctggaggaagataatcaatgtcagcaggcttcccaatggaagccaagagcagggattccagaatcccaagaggaaccaatttccaacctcaaggcctgggaagttcaaggtcgaggggtcatatctggttggcttctggtgacagcgttcatcccgtgtaatagcatggcagaaaactggaagggcaggcaagcgcttgaaaaaagagatggggcaaagggggctgatccactttataacaaccagcgcctcatgagaaccaactcagtctctagagaacagtgttaatgcacgcatgagggtgtgcccccatgacctaatcacctctgaaggttcccattacctctcactcagtactgttgccctggggaccaaattcaccctgagtttcggaggggtcaaaccacatccaaaccatagcagggaggatgtaggccttgagggtggaaatggtttcctctcgggtttctggaatatttgctgttggcttccatgctctgttgctatagggaaacccactgacattaattctctatcttccatgtgtggcctggttttcttctgaaagcttccaggatcctccctttatccccagtgttctgacattatatagtgatgtgtcatagggtaggttgggccccttgttaagtgggaacatttttttttgcagattccagggctgatttaaatatttaatgttatattatttaaatacataccacttaaaactgggtataaattccttatgctatggttataaaaatcacatccaaattgcaaattaaacataaagtaccagctaatgaaactcaaatgcacaacatccctttgctgtgatggctggcttcactccttttgtcactggaattaggtacagattgccgtctctcagtgtcctttgagtgatagcgtttggcttcacttggcgtgaatgagtcatttatatattaaatctaccctgtggcttttttctcattagccacaacaattaacataattctgcttgatgccaatgtgtaaacacagagcagcccggcacagcgtggttatagcacggctgtccagactattcttagactgtgcttgcttacaggaattattttggattgtcattacaatgaaaacatgagatgtaaatgttttcatagacagctcacatagtcccaaggattcagttctttttatacgcttcctatgccagtttgctcccataggcctatagaaagatgagctataagaaattgtggctattgttcagatgagtgtttgaacaggccataataagctgacatttgccactccccacccctgccaccccacgtttctccatcagctgccacaatttgcacaggagtttaatcccgtgttacgttgccatccctattttgaaatggagacggatgagagctgttagccacagtcatttccaggaagctgccaagctatgtctcctagagcttggagaccatgatccatcttcaggtgaggttttagcttgaacattcctgcctgctcccttcactgctgtgggcaggggtgaacgtttatattttttaaaagctaatgtgacatcagacagggctgacagtgtaaactttctggctagttagaagtgtgtgtatatatctgtgtgtttatttgtgtatgtgtgtatgtgtgcatgtgagtgtatgagtggtgtggaatgggtgtattcatgtgtgtgtatgtttgtgtatgtgtttgtgtgtgtggatgtgagtgtatgaatggtgtggagtgtgtgtattcatctgtgtgtatgtttgtgtatatatttgtgtgtgtgtatgcatgtgagtggtgtggagtgtgtgtattcatgtttgtgtattcatccatgtgtgtattcacatggagtgtatgtttgtgtatgtatttgtgtgtgtgtgtgtgcatgtgagcgtatgagtagtgtggagtgtgtgtattcgtgtgtgtatgtttgtatatatatttgtgtgtgcatgcatgtgagtgagtagtgtggagtgtttatattcatgtgtgtgtatgtttgtgtatatatttgtgtgtgtgtgtgtgtggatgtgagtgtatgaatggtgtggagtgtattcatctgtgtgtatgtgtatatgtttgtgtatgtgtgtgtgcatgtgtgtgtatgagtggtgtggattgtgtgtattcatgtgtgtgtatgtctgtgtatatatttgtgtatgtttgtgtatatatttgtgtgtgtgtgtgtgttgtcactgcgggccagctgtgtttcaggaccctgctttgcttgcatttctgcatcctggtacctgagcctgttctgagcttcatccgtggcatgcccagcgccaggttctgcagcgcttcccagtgcagtggcaatgcggagtcccactgctgcttgcaagttggggcaagggggctggtgatggccaagcctacactgtgtgttggtttgtgaggtgtcttcagagccccggtgtgctcccgtcattactgtccttctccaaaacctctcagcctcagaacctggatcttatctttaccttttctttcccccgatccctcatccagttcatctccaaactccatctgtttattcctccctattatcactattttaaaatcttatttttgccaggatcatcttcaagccctgttgcttcgcacctgatacatgacattcccacagcctcctgcctcctccctgttatcccgggctccgcagtggggccatctcttccttctgtcattcccctgtcttgttctggagccatggagccttcagtgtgacagtctctgcaggacaaggggaaccggcagcctatgggccaatgggttttgtttatcctacacaatattttaagaagttgacggacagctttaaaaattggaatttttttacattaaaaaactctattttcagttattcctgaaaacgtagaaaatccagcagcactgagcacatattcctagaaggtgacaggaggtgggaatggcgtgttccctgctgctttccctcaggccatgttttctccagtttgctgcactcctcactctactgtatagcccctcagcctgctccatttctgtcacctgtctggcccccatcgacgtgcatatttgcagcccagagctgactggcttcctggccaaggacctttctacacccacatttagaattcatcttgtctctttgcctcctgctaccattttgcctcttgggagtgctctcccttccctctaaacctgttcaaatcctgtcattccgcaaggtcagttcacctcctccctcctgtgtgcaacttccctgcctgcccctggcggagttttctctctccctgaatcactaaagcgcttcaggtttgtctgtggctttggggccattgcatgtcattgtgtttgtcagagctgtgtttagacagcccgtcccccagtgccagggcctcactgtggctgacacacagtgccttgcactctgcggactctgggttctcaacaaatgtacgacaagaaagatgtgtagaggtgatccagggcctcgtgctatgggtaccaacaggagggcctctcactaatgtggggcagggagtagctgataactttccccagcagctgtgaagacagttgtttcactttttgtcaccagagccactgtttagggacacacctttaatgtgggaaaatgcccaaacacaactaagctctgggacgtcatggtgggccatgggcatgttccctcctttgtaagtgatttgatctatcactaaggtcattcagtgatactgctctaagatcagcatacagaagataaagttaaataggacttcaatcaaatttagaatatttccatacttctcattaagaatattaagtaccaatttacaggattctctacttggtactaggtgctgtctttgcttcccaggactctccctcaagagcctctgggtctctatgttcttctcacctgggttttgtttcagcttcactgacattcagaacacccgggacgcatgctgagctgggagcgggatgcctttctcttcctatgcctctgataaatcagggtgggatttctgagaagcagcataggttggtaaaaagcgcagatgcctaatggctgttaacgatgactcaatcacttgaggttttttccccaacccttgagatctgggctttgtttgcatcagctttctggctggtaaaaccaagctcagggtttctcatcacatgcccttgggtagtaggagtgaccttgagatgcctggcatttttttctttactcctgtcaagcccctttgagaggggaaggggctttgcttcccaacttctgggccagagggcgagtgtactctggggtagcactgtccaatagagctttctgctacaatgcaagtgctctccatctgtgctttccagcacagtagccacttgcctcgtgtagctattgagcacttgagatgtggtcattgcgactgaggaactgagttgtatttcattttaatgtattcaaatgtgcttaccacatatgcttaccatatgggacagcccagatctcaggggttggggaaaatgggtcagtgcaatacctaacagagagccgtgcacagtcctaaggggaagatgcctaactgaagatgcctactgtgtagggcgaggctctacactgctatgcaagtcaaagcctgtttggcctaacttggctggcgtcaaaactatttgaattatatttgcagaaaaacccattgctgtgctgttctgcggagggcattagttactaattgttctctcatttcctttaaaaatagcagacaccaagctcccttagctgtgatttaaggagccacagtggtatagctggcgagtgcagtcacgaaccgcataacagcatttcagtcaacaatggactgcatatatgacagtggtcccataagattataataccctgtttttaacgtaccgtttctatgtttagatgcgcaaatatttcccactgtgttaccgttgcctacattattccgtatggtaatatgctgtccgggtttacagcctaggagcaatataggctgtgctatacagcctgggtgtgtggtaggctacgccatctaggtttgtgtaagttcactctgtgatgtttgcccaacgatgctcctagccatcgaaaggtcatccttcagctttattatcatcaaagcgtttcaacttcctgtttctacatcatctgcttctattaatagctacatgattgttaagtacaaatatgaaaattatgtcgaggagtacaaaatctttcttccattaggcagaaccgcacagatgagatctaaaacgttcacattgataaatactgcttttgaagtggatttttccccttaagagccaagcaaaggatcaaaacggaaattctccacagaaacaagaataaatcactagagaggttgtttctggaattttcctgcccattgagggcctgttcttggagctaatgtcagcgaggatagtgtatcatattccttgacttcctcagtatactggggtcctcacttttgtgttgtaacacacacacacacacacacacacacacacacacaagaggttgagtactattactgaataaatgcactttagtaggaaggaaacattcagaaagtcagcctcttctgggaagccaagacaaacagctcttggagccaagacacagagaggccacacccagggaatgcccgggtgtccccagtgtccccatgtacacctttctctctagctcctgcagatgcttctcagccatccctgtggctggaaggagttgggctgccatgactcctgatgaaatgcaaaattgcaggactctcttaaatgctcttttattttgacattttaaaatgctattctgagaggtatagagaagacttaggtaacagaagagatgagaaatagccaagatctcctttgaagttcagattccaaatcagtggggtctttcaccaaatccatctggcccttcttccctctttttgggctagaggtctttggtggcaggaatattaaactagacccacattggctgcaacaatgaaagaggttgattcactcactgataggcaggcttcagaggtggtttgacacagggatgtggtgactttatctagaaccctgttttcttattctcttcagctctgcctaacgtggagtcagcctcatccaaaacagcctttcttcagggttgtatggtagccaccggtaatttccggtgccacacttcctcggttcagagggagtgaaggggacgttcttgtaaaaacagcgccttttcccagagcccccttagttcttagttggaccacgtgtcttctcttaaatcagtaactggggctaaagccatactgatgccccaaatcccatggtggaatcaggttttccatagacccagagctgtgaaggaagatgtggacccccaaataaagattggggtaatcacccagcaaagggtggctgtcagataggaaactgtcatctcccggctctatcatctgccagtctccccttatatacttacagatgcagcttaatgctagaaagtagaaaattctcattttttgaaagattacttttatggctttgtgactcttaattctcctttgctccccctcctccttctcttcttttcccctactctccttttccttccttccttcatttcccttcttcatctgtccccatccctccttcccttttcctgtcttttcccttcttctcctctttaccccttcatcctgtttccccttttctctctttccttccctcctctccccctagcctctccttccccctgcttatctgtcagcccttctcaattgatgatctagttgtttgttcaacttaacctaactggtggggtacagtcaggtttcttactaaattaaatgccttcatatcctcccactgccccccaggaagaagaaatgccagaggtagaaattgacattgatgatcttcttgatgcagacagtgatgaagagagagcttcaaaattacaggtaagcagtttccaaaattgagaaccttctaatcatggacacttgagagtctacttgggtcttcagtgcttggcatcaactgattccgccctgtggtggtgttggcaccaggacctgggccatttgcagagaggaaagcaatgggctgctaagtgttcactctcttaaactgcctctctgaggataaagcagcccttgactatagtccattttcaaagcgccttatgggtataactttctccagccccattttcttgggagaaacagctgattctgcttccaaagatccacttgccagggaagggaagtgatgccccacagttgtatgagaaagagagggactgagctagcactggaatatccaagactagagctctggtctcacagttgtggactgtatcattcatgaaattaatttctaaatattgcttatgacataattctatttagtagacgatctgttcatagacagtgctcacctcatagcattccagtacaacgatggatattgagatgtctagtatttccttagtggacagcaataaagtacagtacttatttcccttcccacaggaggtcaaatctatcatttttaaatctgcttttgggagtttctaaaaccaattaacttttgacttgccattgttcttaatgtccactgataattactgttaatgactgttggtgaccacaaatggcaaatggccactacggcaatcaaagggcacatttgaatgtattaatgtgtttaatgcattagttattactagcatcccttgagtggtgaacagtctcaattatgacaattatttcttcttgctagatttagctgggagacaatagcatcctagttataaaattttaaaaagataacgcaggtatcagttctatagaaaatgtaatgacataacagagttttcttaaaattgagaacttgagaggagtttttaagctatcatcaccccgcaccccccagttcccaggtgaggacccaagctggtttatggctgcattgcacttaaaccccttgcttcctgagtgcagtgtgggtgccaccatcttgcacaggctggctcaacttgaatatccaccaagttggcagccaaaggaaaggtgtgtgcatgcgcgtgtgcatacagaggaggtaaaaagtcattgaccagaggagtgggtttgaaaccatttggatcctgccgggttatatccagttaattgaaggaaaaccggaaagggggatttggttcctgtggaaggccatcctggatttgagctactaaattagtccacatctctctgaagtctgcaacctaatggatgcttgagcatccctgtccttttttaaaagaagcttttttcctcagcaagacattcaaaacctggtcaaggggctgggcatggtagctcacgcctgtaatcccagtgctttgggaggccaaggcgggtggatcacctgaggtcgggagttcgagaccagcctggctaacagggcaaaaacctgtctctactaaaaatacaaaaactagccgggtgtggtggtgcacacctgtagtcccagctattcggaaggctgaggcaggagaatcacttgaactgggaggcagaagttgcaatgagctgagatcgcaccactgcactctagtctgggtgacagagcgagattctgtctcaaaacaaacaaacaaacaaacaaaactggtcaagggttatattttgttttcaatgctatggtagcaaaaaaaaaaaataaatattttcctgttcaaaaaacttctatgtagcacatgtgtatgcaggctgaagaatttatgaaggttaaacgttttctatcttcagactaccaactggtgctgaaatgaagtgcgtttctagatagtatgaaatcttgatttaccattataaaataatactatgaatataaaatgatttttaattttgccttaaaaataatgctgaattttaaaataataaaactgattttctgtgtgtttaattctaggaagctcttgtagactgctacaaaccaacagaggtaagcaaatcacttttcctaaatgccatgtttgaactggtttttattaaatcaatttgtctatttttaaagcaaaccacaataagtaggtttgagtgtgtgtataccaattagcaattattatccatgagtgcatatgtttgaatagctctaacttcattatttctaagcctaaacatgtctagttcagagatacttaaaattaatggagcagagtgtgttgcttgtgttagataaaagccaaacttcaaaggaaattgtgaaagggtttggaatcattttagtaaaagttttaggtttataactggtttatatattctattggtttattggtatgtattttttttttttttttttgagacggagtctcgctctgttgcgcaggttggagtgcagtggtgtgatctcggctcactgcaacctccgcctcctgagttcaaccaattctcccgcctcagcctcctgagtagctgggattacagacgtgcgtcaccacgcccggctaatttttgtatttttagtagagacggggtttcaccatgttggccaggctggtctcaaactcctgacctcaggtattcacccgcctcggcctcccaaagtgctgggattacaggtgtgagccaccgcacccggcctatcggtatgtattttttaaaagcgtaaaggcaggtctgtctttccaaagagttacctttattgggaaaaaatgttatgctttgtttagatatttatcaagtgtaatgtataaacattatcataaaaatgagcattaatgtgattagactaaagcatttcatgtagactctcatgactgacagcacatagtagaaattaaggttttaatcagttatgaaaatattagcaagagaagtactttcttcctctgataaattggagaaattataagatccgtcagatgttttgaagtctgtttgtaacatcaaagcaatggtgataagacttctgatttttgaagaggtctaattaaaaggggggaggaaagcatgcttttacaagtgtctgatttcaatgacttggtttgggactagttacctatttgagctttatgcttccaacctccagctttgattacatcttgcagtcatagagatttttaattttaattttagccaccaaaatatatacttttagaccaggcttggtggcccacacctgtaatcccaggccaatcacttgagtgcagcagttcaagaccaacctggtcaacatggcgagatctcgtcttttaagaaaaaaaaattggcctgtcgcggtggctcatgcctgtgatcacagcactttggggggccgagacgggtggatcacgaggtcaggagatcgaggccatcctggctaacacggtgaaaccccgtctctactaaaaatacaaaaaattagccgggtgtggtggccggtgcctgtagtcctagctactcgggaggctgaggcaggagaatggcgtgaacctgggaggcggagcttgcagtgagccgagattgcgccactgcactccagcctgggcgacagagcgagactccgtctcagaaaaaaaaagaaaaaagaaaacaatattatatgtatatatttaaattaatgtaatactaatacatctgaacccccccccccaaaaaaaaattctgaggcttattttaaaaaggtaacagtgactttctccacctttcaggcccttttcctattttatattatatttatgtattgtatttctatattttcataagcaacacttttgcgcttttggctgtttcccttccctgctatttgctcttttctttctttttttcttttagagacagggtctcattctgtcacccaggctggagtgcagtggtgcaatcataactccctgcagcctcgaactcctgtattcaagcaactctcccacctcagcctcctgagtaactagtactgcagtcgtgcattaccacacccagctaaattatttttatttttttatagagactgggtctcactatgttgcccagacttgtcttgaactcctggcctcaagctatcctcctgcttcagcctctcaaagtgctggaattacaggcatgagccactatgcctggcctacttattcttttattcttaaatatgcatttactgtttttttttcatttattgactttaggagaaagatgatcactctctctctctccacacaattccttttcatctataccctcatcagttatttaacagtattttgttaaattagtagtcaaggtttataatactatgatttaaacaaatgtttttcactgttaagctaacagtaaatatgatcatggttcctttttgtatagccctttgtttctcttggagttgacaatccttgcctttattattattattattattattttgagacagggtctcgctctgtcacctaggctggagtgcagtggtacaatcttggctcaccgcaacctctgccccccaggttcaagtgattcttgtgcttcagcctcctgagtagctgggattactaagcccagctaatttttgtatttttagtagagatggggttttgccatgttggccaggctggtctcaaactcctggccccaagtgatccacctgccttggcctcccaaagtgctgggattacaggcgtgagtcactgtgcccggccataacgcttgtctttggttttgtctaataccaattggtattttttgttgaactctccagtgtgtttgtcaaacatgtaacatatttcctgactgttcaatcacatcattaccatccctctgcccccagacttttctcctggagcccctatacaacaatctggagaagtttttctttgtgtttatgttttaaattattctactctctgcattgtctctgttttctctgaatcttacctttttctgcctattttcatgtctttgctgatttttggtagcatagtcacattttaatatggggagacagtaaactgatttgcatttgtgtgtataagaacggcttgtttttttgttgtttttgaacagagtcttgctctgtcaccccaggctggggtgcagtggcgccatgtaggctcgctgaaaaacctgccttccgggttcaagcgatgctcgtgcctcagcctcctgagtagttgggattataggcatggggcaccatgcctggctaatttttgtatttttagtagaggcggattttgccatgttggccaggctggtctgaaacttctggtttcaagtgatccacccaccttggccttccaaagtgctgggattataagcaagagccaccgcgcccggccaagactgtttggctattgctgggtctcactatggagtgaccaagttgcaagccagatttttcttctgaatctgttatgtgtggaaggggatggctcctcaaaaatgtcaatgtttggttctttttctctggagattcaggatttttagagtttgaccctcaaattccctatgtgagggttgacggtctgactttaggctttctggaagcagagaggagaaggcaggagactttaccatttagctgtttggggactaaagcttctttatttataggtagttggggaattaatataggaaagcgattttaaattgtgtgatgggttagacaagaaaaatagaattgtagtcaagaaaaatgatgaatgatgtagatgaatgaacatgtaatatgggagtggaaggggttgctgcagagaggaggccccattggtcgctgcagacacgcattcactaatttcatcaatccctttttcttcagttctccacctaagtgaagaaattcatgctttggttatttgggtgagagagtttggacttgcagatttctcttttgcctggcttcgcagccaacagtgaaatgcagtaaaagcactgcattttctcatggaaatgagcccgttctctccctaggttttataatgtctagggaaccaatatttacactagttaggagccatgctgttcaatgaaaatggtgggtcttgcctccagagcaaaaatatttctcatctggtttctatacggagggtcaggagatgaaagaatgtattatttgaacactcttcagagttccaaaagcagaaaaaggagctggagtctctaactgaacatccctgtgttctttttttagctcccatttctaggaatggagaaatgatgtaaaatgctgaggaatttcattcaagttcacttatctgttaacgggtcatttcaaaaaggctggacacttttgcctttgagcatatgatcacaggaaacagattttactggcatctggattgtgataatgacaattaatagcttatatttttccagagctctgtagttcacattgcactaacatacattactttatttaatcctcacaattgtcactttaagtagacagggtttgggtagcttgcccgtaatgtcagagcagtgagcaagagagtcaggactcaacccgagtttctgacacctgatcttgtgctctttctttccaatctgccagtcttcctaagctacttgactcagcaagaggcttagaactttataggactttgccctgtctgaactaaatgcctatcaattaatggtgttcttttctaagcagggatctctagaggtgctgttattgatcaaaattattttacttaaaattgttatgccacttggaagttagaaatgtgaggaagatgtctttgctgattcagatacttttattttataatccctcattgcagaagtagggtgagtggtggaaagaatactggaatttgagtcaaaagtcttatgccaatgctagcactaactgtgtgacttcaagcaatgttctcaacctctctgagtctccctttcctcctctataaaatggaggtaataataaccatgtctctgcatattggtaaggattatttgctgtgataatttttaaaatttattttattttaattttttttgagaaagagtctcactgtgttgcccaggctgcagcgtggtggcacaatcttagctcactgcagcctcaatctcctgggctcaagcgatcctcctgcctcagccccccgggtagctgagacaacaggtacacaccaccacactcagctaatttttgttatttttgtagagacaaagtttctccatgttgcccaggctagtctcaaactcccgagctccagcagtccacctgcctgggcctcccaaagtgctgggattacaggtatgagccgccaagcctgacccacaatgataattttagtggtggtaacgatagcaatgataatggctaaaagatcactaggcacttagcagatgccgggtgctgatctagtcacatctcatgtattaacagatttaatcttttttttcagaaaaatcttgacatttgttaaattcttcatagcttttaaaagataattttaagtagactttattatttagagcagttttaggttcacagtgaaattgactagaaggtacagatttccaatatgctcactcccatccacctcacacatgtacacagcctccccaattgtcaccatctcctcacagagaggtacatttgttagaactggtgaacctacattaacacatcattatcgcccgaagtccacggttaacattaggattcactcttggtactgtacattatggatttgactgatttcataatgacatgtatccaccactacagcatcatacagagtagtgtcactgccctaacaatcctccgtgctctgcctgttcatctctccttccccactcacccctggcaaccactgatctctttattgtctccatagttttacctttctcagaatgtcatatctttggaattaaccgtatatagcctttctattttcagaatagccatagcatgaacatttgaagccttttcaaactggcttttttttttttttttttttttttgtggtggggtcttgctttgtctctcaggctggaatgcagtggcacgatctctgctcactgcaacctctgccttccaggttcaagtgattctcctacctcagtctcagtagctgggattacaggcgcgtgccaccacacccggctaatttttgtgtttttactagagactgggtttcaccatgttggcaaggctggtcttgagctcctgacctcaggtgatgtgcccacctcagactcccaaagtgctgggattacaggcattagccaccatgcccagcccaaaatggcttttaaaaaatgtgatgtcaacatttagcagctacagactggcttcttttccttagtaatatgcatttaagtttgctccaggtcttttcattgcttgatagctcatttcttttcagtgctgaataatattctattatctggatgtaccagagtttatccattcattcacctactgaaatactcttggttgcttccaagttttggcaattaatgaataaagctgctataaacattcctgagcaggtttttgtgtgaacataagttctcaagtcttttgggtaaataccaaggagtaggattactgtattgtaagaaaagtgtgtttaggttttgtaagaatctgcttacctgtcttccaaagcagctgtaccattttgcattctcaccagcaaagagagttcttgttgctccacatcctcaccagcatttagtgttgtcattgttctggatttggaccattctaattggtgtgtagtggtatctcattattgttttaatttgcatttctctggtgacgtatgatttggagaaacttttcatatgcttatttgtcatctatataactatagatgttaactatgtctgttaagttttctggtccatcttttaactgggtgtgtttgtttttttttgttgttgaattttaagggttctttgaatattttggataataggcctttatcagacatgttctttgcaatattttctcccagtctgtggcttctcttttaattctcttgacagggtgtttcacaaagcaggaatttttgttttagtgaaatccaccttatcaatgttttctttcacggatcatgccttttgtgttgtatctacaaatcactggaaaacacaagatcatttagatttttctcctacattaccttttgggagatttatagttttgcactttacattaggtccatgtgcgatccatttgagttaatttttgtgaagagtgtaaggtctgggtccaggttcattttttgcacgtggatttccagttgtctcaggatcatttgttgaaaagcctacctttgctcctttgaatgcctttgcttttttgtcaaagatcagttgatatttatgtcagtctgtttctgggtctcttttctattccaattatctacgtgtccattctttcaccaataccacactgtcctgattattgtggcttcaagtatgtcttgaggttggtagtgtgagtcctccacctttatttttgtcctgcaacattgtgttggctgttctgggtcttttgtctttctatataaaccttagaatcagtttattgattttatccacagaacagcttcctgggatttttattgggatttcattgcgtctgtagatcaagttgggaagaactgacatactggccatattgtatcttcctatctatgaacatagaatacctctccaattatttctgtcgagatatcctcaagcttaaagattctttcctcagctgtgtgcagtttactaatgaacccatcaaaggcattatttctgttatagtatttttcatctctagcatttctcttagaatttccatctctctacttacattccccatctgttcttgcatgctgtctactttatctatcggagcccttagcgtattaaacagagttgttttaaatgcctggatggataattccaacattcctgctgtatctgagtggttctaatgcttgctctgtctcttcaaatttttttgccttttactgtgtgttataatttttttttgatatctgaatatgatgaattaggtaaaaggaactgctgtaaatgggccttaagtagtgtggtagtaaggtgtgaggagaggggaagcatccatagtcctgtgattagttctcagtcatatagggagcctgtgtccttgaactgtgaacttcacaagtgcttctcggtcgcccccatgcccctttaggtggaatggatagctagagccagctggagtttggtatttcccttcccccaggtcactcaggctctactaaaaccctgtcaggttaggctctggttagtttctcctcaggacagatcttgttaaataaacttttagactttggggaaaaaaaaagaagaagaaaaagaagaagaacagaatgctccggtgtatttcaaaatggttcctttttatctcgtcctgctggaagttcaggggaatttttctccagtgttcactgtgaggacctgggagaattcttagaggtaagactcgtacaaaggtatgctcctacctctgcccgtgactggatccccatggaatttttatctctaaaacttgtccactctgagactagcaatttgtcaattccagttcaagtttttctactcatcctttggttcccacaaaggttgttccttgtgagtttctcttccaggcagttgtgattttctgtattcacctgtgagtccctctacttcgggggcatttgtttgctcagtgacctcacttcccttgtggatctaaaaagagttgtggatttttgagtttgttcagctttttacttttgttaggatgggatggcaatttccaaacttcttacatacctgactggaaacaggaagtctcatttaatcttcacaacaaagctaatagattgacaccattgttgtcagttaaggaatttgaggcatagaagtgttctgtaatttgcctaaattcacacagttaatgaacggagaagtcaggttatgtattaaagcacatgacataaagcttcacacatattaggcccttagtatgctagttgaatcttattctgtataaagtaatgcttgcctatcacatgttaaatatgcaagaagtccaagtttgccaataatgatattcttggattattacatttaaagagttgactttaaagaatcttctaatttcccagaagtgatattgtttttggtgtgtcaccttctgtcatatactttgggtctacggcttcatcctatatgggccactggccaatagggaaaggacttgtgtgcccccattttgattcatattcattccccccccaaatccatagctgacctgactgattcatattcagtctgcggactcttgtcatgtaaatcttcctgactgctgggaaacacagcagtataattgtgagcacctcactaatgtatgagtgagtgattagtaagaatggtgatttcatttttttccttaagtaaatgccatttctaatgtagtgaatattaaaatagatctgacttacaggtagcaaaaggatgtttccatataatgcaagaggcaaaagtaattttattttggatattacttgtatttgcatgatcagtagtgttagcctagtggacatggtaaaaatcagagatgggggtctggaagcctgctagccagacttaggaggagctgcttctcctttttctcactatctttgcacagtttccaattttgggattacaaaatagaacctccattgtactgggaggatgaacagaaaatgcatttaatgtgggcttgagggcatctgccttaccgtctgttaggggagttgtctagtcaatgagcttttttaaaaaaatctctttttatagctgaagatacctatgccattgctctttgataaacatcaggtttttctttccatgcatttattttttttttgaactagaggttttgatagaacctatcattgtatcaaattatacaatgatatcaaagcctatacattgataggcatccattcatccaggataactaagtccgagagtaggtggcaaaaggcatttctgggttccagtaatctaccaggtaatggaaatgtcatggacacacactggtaccagaaagccatgtgtgatctggtttgtgagtagaaatcgagcagtgttttctaaaaggcaggcctgctctgctgttcttctcatattggcagtaagaaggcagagtttccttctaccatgatttcatggtaactgactttcagactagctttggtgatggccattgtcaatcatttatttagcatttaaactgatcttttaaaatcattgttcagtttatggatacatggaagtacattccttctgcattgagctgtttacagtgtagagagaatataagtggtatttacaatacaggaaaaccatgtgatgactgaaagagacacagcttggtgttttacaatcttttctttattcatttgctcaacaaatgtgtatcgaatatctgtgtgcctgtaactaatctaggaactgagacctggcagggaacttctacatccatttttaaagcaacctcttggaaggccacagtaaactatggtggaaatttaaatgttcaaagaacatttaggaatgaaaggacagaaatgtcaggctgtgagcttattcgatggttctctaagttagaaaccaaattgcttgacagaatgtgctttttagggcatctgcacttgctagaggaagcagtcacattattcatttcaatgggtctgagtgtgtgtccataggcagggaactcctttcttatgtcagacccttttcatctggctgtcatggggtttcctcgaaaaagacggcaatcttgggctgggatgaggaacagagcttgaatgctagattggtgagttgaaaagacacctttaaaaagttgtcacgtttagaacaatgtttctgaatagagaaggaattgagaaggacagaccagaatcagatgaaaactacattttagtggctgtagccactggctacaaaagccttataatgttttagtgtcattgggcaggcaagtattaaaggattggggtttattagccagaaacatgtgtagctttacttaatagcccaaaggattttggtcccattattacaattgctcacatactttcattaggattctatgcaccagacctcatctgccccaggtaaaagagccgtacgtgctggagctggaataggacccacatttgagtccaaatcctatgctctgtcaactcttcactgccttttcctgaatttttatgaattgagcacaagctctactttagaatatttataaagctgattaagatttataaattgaggaaaatcaacccagaaatgttaggtaagcttgctgaagacatgcagtcatgaagcaaaactctgcatttatttcctggacttcattcagcactctttgtaaagttagggaactgtccaaaagactgctgtcacttctggcaccaatcacaagttcacacgtcctcaaaaccaacttcagctttgataatttgcaagaagaattcaaatattttatactcatggttctggtttattacagggaaaggctatagtcaagggaagagacacaggggacagagtccaggaaagtggcaaatgtgaagcttccacttgtctcctccctgtggaatggacagcattctcttagcagtgatgtgtgacaatatgcaggaagtattggcaatctgagaagctaacctgagcctgggagtccagagtttttactggggcttaatcacatagacatagttgactacccatgtggctgaccttgtctccagctgataccacatgactcaaagcgtctactctaaatcacatcgttagactatctatcttggcaccgtaccccaagtatacgaagatgcttttttttcaggcagatattctaagggcttagagctcacctctcaggaggtgagggcaggttaaatttttcactatacactcttagaagcaggatgaccatgagatggtgatgataacaataataataatagtgatcagaagaaattagatggcagtgtaggaaaagccacgtgggccttgcttttgggtgccttctttctcttgataattaataattgttatttttataagagacacgatagaggaggcacaagctttaaagggcagtggacccgattagcattttcaaatgattgactgtgattttatggccttttcttattcattaaactgagaatggccaaccctgtattagaaacagctctacactctcttcctatgcttagacttatctagacaaaagaaagaatataaaataaagacaatgtgacacatgactttaatttctatgtctataacagagatagttataatcaaaagtccccaaaagcccggaaatgggtttcttttatttaggcaaaattcagttatttgtagcaaataatacactccctcattgacaatgaatgagaatcttggtgaagttatttatactttagttcctcagtgattttaaagtcggagattataattttgccaaatttactctattgattatttactgtgactggatgatatatgtgaattttattttacattgcccaaattgaaaatgtaaagattctgagacaccagttagtaagtgaggggagaattaaatgctgtaagattgaatctaggggagggttaatgaactgttctgctgcatacaaatagaggttgggatttgggtaaaaaaataaattagcccaagaacaatggactgaatctataaaatagattaatgggacttcgctcacagtggaacaaattactatttaaaggcagatagtctagaaaataagtggacaaacatcgtgtcagtggttttaagttaaaggagggggaaaaaacaggatgtagttaagaccttcaggaatttatgttgacagaagtcattttaacaacagcagccacaaacccttacccataacagatccataagcctcctttcagataatgaaaaataggatcagttctggtgcgccatgccagcaaatgaacctctcgaaagataaaaacaacccctgccccccaaaaagaagggggaaattaaatgtgtcagtggtgagtgatggtgggcgagagggcttgctgtggagctgattcatgcctgtaacttccaggagcaaatccccgtgtcacactgagttggggaacaccccaaagctgagctcatcagtactgattcaactgcctgcctgtttgccctcatccaggagttttcagtgtgatttttaaatgcctagctggttctttgggtgaggacattttgccatttggaacaatttgcaggtgttatcctcaccttttccaagaggcacacaccacctgcccattttcctcactcatctaaactttgggcatctggaaattcttcccttcccaccacccgcttcacactttgcctgcttcccacccatctgctaatgtcaggctttttggaagaagtgtcgggtagctgcttcacaggaaactcaccatggagttgactcaatttgctgtaagttggcagccagcccccaggcccagggcagatggctcctgtgaatgtgcaccttgaaggaagtaactgatcaggggcacaaagaggaggcaacacgtggggagttgcatggcccatgtggatcccagcctttggaatcctcatctgctgtttctctcccgtccccccaccctctgcgtagggaatggatgggtctttttttgttgttgttgttgtttgtttgtctgtttttggaaaagctgggtgagcatccgcagttcttctgggcaccctttattagagcttgcgtaatgtatacaatcactgccattggtgagactgtttcctgagcagggattttaagcatttcttcttttgtcaggaaatatttccaatccaagggccactgcataatatccatttatctcgtttagctttttaaatggctcaaaatgcttaaaagaaggacataagtataggtaatgcacagaacagggatttgcagtgatactgtagtttccccttttcctacttgccaacgggcccatctttttaaagcagcacattatcatcaatgagaggaacagatgaattactttgaatgactagggaaggctaccagatagttggctgtggtgataattacaaaatgtgtgtccatctgctgctgctggtactggctagagcaggtggggcgctgagggtggaatatgaaagtcatgggccccaagacggactagtgcagggcgcagagctcagagtagagggtggccactgtgataccacgcccctgtgacagagccatgtggtagaaactccagggggagagaaaggaccttgtgttttcatggccgctgccgcatcccctccgaaacgtgtttggacttctttctttcttagaagtctctcagcagcatgttgtataaagtcagttttccaagctccctggaaatgttgcttgtctttctattgcctcttcgatgtctcctctgtattagtatgtgtgagtataaaggaacatccaaggcccacccttcccctaatgctctgtgtcttccgtcacaccccaagtctggctagcttccagtgctcgaaggggcatgtctggagccttcatagttcctgggccggttgacactttgtctagttttttcctcactcagttgacatttaaagatttcagtgtctcctctctctttttcttcacttttatgccagagttacaggaattaatcagttcatttgtacaatcctttactctgcaaaactttgagcagctcctcttatttcttatgcactcactatgctaggaagacaaagatgagtaagacttttggaatcatgtgggggtgacaagtatgcacatggattattttgtatgcattgtaactgtgtgaagaatattttgcaaattttctttctcagcttgtgtattttgcccaacattaggtgtcggacacttatccttgttaatacagaaagctgtcgttcattcatttttattactgtatagtatttctttctgttcatacactgtaatgtatttatccattcttctgttgatactcaggctgtattcagtttttcattattatgaacagtggtgcaataaaataactattattggcctgttgccttccttgtgtacaagactttctccaagaatatataagaaatggagttgcttttaaatgtttgcaccagcatgcatgcccaccaacaggatataagaattccctattgaactcatgatttctacacctggtattgctaagtgttaaaaattttgccaactgatgctatttcattgtttcaacaaaatttttcctgactgctagtaaggttgagacattttttttttcctacttgcttattgggtgttcatgtttccttctctgggaatttccattttgaaatctttgcccacttttcttttgagttgttggtgtttttcttgttgatttttaagagttatttatatattctagatgacaatcctttgaccttgatataggttgcaaagttattttcccaaactgtggagcttattttcacttgtgttatcttttgtgtacagaagttttaaattttaattgaagccaaatttattaatgacatctttggcttgtgctttttaaaaaaaggcttgtttaagaaatctttcgtgactgtaaggtcttaaatacagtcttccttgtatttggctttgaaagctttcactttcactttttacacctaggtattcaaaccctcttgaatttgtctttgtatatggtgtaaggtagggatctaattatgttttggcctattgtcccagtcccatttattgggcagtcagttcagtgtaccctcactgctctgtaatccacttctgttgtatgtcaagtttccttataagtagggactacttctggctatttgtctacccctgcattttgtctcaattactagggctttagaataagttcttaataaaggtccaataagtctacaattccttattcaaagtgtcttaactattcttgaatatttgtatttgactagaattgcattaaatttataggttaatttggccagagaagagatctcgatgatgatttgttcagggcacacaaaaatggacactgtaacttcctgaagggcagggacaggttgtaggaacagatgggtaacagtgagttagttcacttttggtcatttgagactgatctgcccatgggacatctcatggagatctttggtagccccagaaaatgtgggtctggatctcagggtgaaaccagagctaaagatgagatctgagtcactagtgtggctggtaaaagagagtgccccaaggggcctgggaacagagctttggaggccagcatttaatcagcaggtggtgggtgggagtgcaaaaaggggagtgaggaggggcggttagagacccaggtggagaaagtacagcaaatcttcacttcacatcattggtaggttcctggaaactgagattttaaatgaaactacatataaacaaaaccaatttgaccataggctaattgatatacacgagagttaagttcctacggcatatttctggtctcaaaaacatttccaaacttctaaataaagacccccaaacacttctaatattaaacattgaaataaatgtgagctatatagacatttaagaaagactaataaaatcaaatttgataattagtcaccccgtttgtggtgaatctgtgagtgatagtgatcatagtggcagtgggttaaatccaggaacaaatgtgtgcaaagtgaaaattgtaaggagcgcccccctcccatcacatggttccaaaataatcagtaaccagtgtgggagactggccaggcactttcggactgcattgttgattgccatgcctttgagtgatcatcatattctttatgatttttgttttataataatttgtattcatttattttccacccctctttttccagttcagtgtggctagtggctggagctcatcctgacagctcagagcacgcaccaggcaggaaccagccctgcaaaggaaggcaccccattgcagggcatgctcacacctgcacccacattcactcacactggaacgttgtagctatggcagttcacgtaacacacacagctttgggatgtgggaggaagccagaggactggtaaaacactcaggcagacatggggagagtgtgcgaattcccacgcagacagtggctctgtgggggagtctattttttttccccaaccttatgtcaaaacaatgtggaacaaaccaatgttcttggaggccctgctgcagagggaagtaggcaagctccttgaaaaactccccccaaaattgtactgctatacactcactagaatgactaatatgaaaaatactgacaacaccaagtgttgggaaagatgtggaagaactgaaattctcgtaccccactggtgggagtgtaaaatggtacaatcactttagaaaactgtggggaggggggcggtttagaaaaagttgagcatacacattccacaactcagccattgcattactgaatatgggctcaaaagaaacaaacaacaaaaaaaagaccataaaattacttgtgcaatttattcgtaacaactttatttgcaatgacgagaaccccaaacatttatcagcagatgaatggataaacaaatagcagtctagctatacagtagagtactactcagcaatataaaggatcaagccagctgggcatggtggctcatgctgtaatcccagcactttgagaggccaaggcaggcagatcactttaggtcgggagtttgagaccaacctgaccaacatggtgaaaccctgtctctactaaaaatacaaaaattagctgggcatggtggtgcacacctgtagtcccagctactcaggaggctgaggcaagagaatcgcttgaacctgggaggcagaggttgcagtgagctgaaattgcgccactgaactccaacctgggcgacaaagtgagactctgtctcaaaaaaaaaaaaaaaaaaaaaaaaaaaaggaatcaaactgcggacgcacacaatagtatctaatattggtgaatctcagaaatattgagtgaaagaagccaagtaaaaaagaatacataagaggaatgatttcatttacataaaatgcaaactaatttatagtgacagattaactgggtttgggaccagatgagctctaaatgggaataagacatctttggtggtgatggaaatgttttttctttgttgtgttttaataggcaggatctcattttgttgtccatgctggagtgcaggagcacgatcatagctcactgcagcctcgaaatccttgggctcaaatgatcctcctgcctcagtctcctgagtagctaggactataggtgcgcaccaccacacccagccaatgttttaaattttttgtagagatgggatctcgctttattacctgggctggtctcgaattcctggcctcaagtgatccttctgcctcagcctcccaaaatgctgggattgcaggtgtgaggcactacacccagctgacggaaatgtgctgcatcttgatagtcatggtggtttcctgggtgtaaccaattgtcaccactgatcagtgatacacttgaaatagatgcagtttattgttcttaacttattcctcaatgaagttgataacttaaagagaaaaggaaaaataggggtccttagcagtgtcaagggacctggctgggggcactggacgtgccaatgaggagagtcttgatgattctgagggctgcctgggtagaatttcagtgggcagaaaagtcagcattccacgcactctattcttcctttcctccttcccctcctctttcttctttttttccctgctttgcctccttcttaaattcttcttttctaatttataagacagctagaataggagggagatactgagggctctggagatttttattgtccccttgggaagaggctacgggcagaactggaggaaaaggttcgtcgtactcaggggagaatttccagtctagctgtggacactgacctttgcatgtctttcgtccctcctcccatactggaaaatgaaaggattgttgtgtttatcataacacatttttggtcattttagtttagtttgtaattagactataattacctaacccggttgcttaataataaagacttctcaccccaggcagcatggtgcaaagggaattgtgccctccaccccagggtggtgatcatcccaggtccctttggcctttatattaacctacggtttgaatcttggtctgaccattgagctgctgtgtgacctcagacaaaccgctaaacccttgtgagcctggtttataatacttgtaatgatcaaatgagacagtatgtgaaaataaacagagtggctgtcacatgaaaggtgcccagtaagtatgtgctgtatctgagtccctgacagatactcagtacccgcgagagcacggtactgtgccaagcaaactagaaatgcacacacataggaaagaatagtctcgggtgagtgaatgcattaaaaaggtccatgcggtgcattctcagatcccaaaatagtgcccaggactgagatgagaggtaggggcccaggagtttactgaagacaggaccttttcattgttttccgtgagagggtaaaacttcacctgcagtgtgacagcggccacatccaaagactcagaggagccagcatgaggaggaggagctgaaagcggagggaggtggttggtgccactgtgtgtgtgtgtgtgtgtgtgtgtgcgcgtgtgtgtgtttagccaggagggagctgttgggaaatgccacctaaggaatgttttcaagtgcaattctagcacttcatgatgtgaagaataaatacgatctcctttgtagtcccttgagacgggaggtcgcacagtctgggtggctctggagtggctgattttggtcctgggctgttgctcaggctgtggggaggagcggtcccaggcaggaatctgaggaaggagctacagggactgtggcccttggccaggcaggacggagagcctgctgtggattttctcagcggttagagtctctgttgtctaagctgggaaaactgaccatcactgagggagaaacactggtggaacactgacagcttcctcagaagaaacacatgtgtgctgcgcccagcctgacatccatgccccagcctgagcacccatggtctcacttggtgtcacacaacatacttctcctctgtcttcaatgtcaaacctttcccatggcgaaaatgggcgggggtggggcaggggggatataagctacatttttcttagtgtggtcagagtagcatattctttttttttgttgtttgaaacggagtgttgctctgttacccaggctggagtgcaatggtgtgatctcagctcactgcaacctccacctcctgggttcaagtgattctcctgcttcagcctccggagtagctgggattacaggcatgtgccaccatgccctgctaattttgtgtttttagtagagacagggtttcaccatattggtcacgatggtctcgaactcccaacctcaggtgatctgcttgcctcggcctcccacagtgctgggattacaggcgtgagccaccatgcctggcccagagtagcatattcttgatttgaatttgtagactggaaagttcagtgtagtctgatgatgatgatgataacgatgatgacagtatcaagcacttgtacagcacttactactctttaagcacttttccaaacatgtaacatacagtaattcatctcatcatttaatccttacagcatccttgaggtgaggtcttattgtcattgctcctatttataggtgaggaaaactgaggcatggagaaaatgattcatttctaagtggtgcagaaggatttgaacccaagtcatctgactctagagtccctctcgtaggcatgtggctacactgcttcttaccatgtgtggtatgtattgggtgactcctttctggcaggaacaagcccattaggttttttttaggcatctgtttcaaagggttcttctatatttgtaagccaaacctttttcttctgtttctctccttcttgcatcattatacgatccatagtcctcaggacacacggccccagcctcatcacaagcagtacatgcgacaatttgtccacctgctgttctgtccctgcccagggctgagcacaacagcccacagagaatgcttctgctgagaggtagattctaaggtgtggacccaggatctcttaggtagtattttgagacatatttggacaaaagctactgaggcagtgtagaaaatagatactgcttgtcttgaaagctaggtcaaggcaaatgtttgtttgtcttttaaaaattatggcagttagctgaaattgtatttcaactgctaggaaactagaatggccagatcttagaaactggtggagaggcagtcagttaataaaaatttccccggaaggagtgatgggggaaggagagaggagagggtgggaggaaggaaagggagggagctggcccttccagagcagtcatttccggattctgtggcctttcagtgaacacagaggtctttcgaggcctctcagagctctggctgccttctccagtctttggctgtgggaggcagcatgggaggagcctgaactggcctgacaggggctgtcctttgcccgcagggcacccgttcacccccagctgcagctcatgccatatgttggcagggcctgtgtttctgtgtcttctttcccagctggcctgggagctcctggaaggcagggcctctgccaccttctgctctgcatctcagcacttgagtagagtctggcatagactctacttagattagagcatgggctcagtacatacttatcaaattcagttggcatcaagaagcctggattcaaacatttgcttggtgatcgtaggcagtgacttgtaatgaactagaatatcagtatttttgaactgtaaaacctctactacattggattaaatacgggaccatgtaaagaggccacatagaggaggccttcaatcagggtttccttcttttttttttggcggtcgagcgtaagcagtgtcagatccccatacagaaaccacatccaccagggagttcctcattgatcctcacccatcctattagccagggactgaaacttcaaaaaagaatggattccctttttagaatattgcaaaagatcatgtctgttgtggttaaagaattgccttaaataacatatcattttcacttgaatatcctgcaacaggggaacactcgtgttcatcctttctttcagcatgtccaatatacgtacaagttacatgggaggaggctgtataaaggtagtggtgaaacatcagcttggaggcagcctggtttttaataagatgtacacagaacttttatgaagacagacatattctgggacagaaagcaattttcaaatttaaaaagattcaagccatacaaagtgtgttctttgattacagtggaattacattagaaataagtaacagaaagattatctggaaaatctccaaatccttagaaactaaatgacacatttctaacccacagtccaaagaagaaattaaaagggaaattagaagctattttaaactgaatgaaaataaaagcccatcatatcaaaatgtgtgagatgccactaaagcaatgcttagtgctgctgggggtgggggaacatatagcagtaaatgtctgcatcaggaaaggtctcaaagcaatggcctgagcttccaccttaggaaccaggaaaagaagagcaaattaaacccaaagcaaggtggagaaaggaaataataaagataaaagcagaaatcagtgaaatagaaaacagaaaaacatgctgggcacagtgtaattacacgcctgtaatcccagcactttgggaggccaaggcgggtggatcacttggggtcaggagtttaagaccagcctggccaacatggtgaaaccccgtctctacaaaaaatataaaaaattagctgggcgtggtggtgcatgcctgtaatcccagctactcgggaggctgagggaggagaatcacttgaacctgggaggtgaaggttgcagtgagccgagattgtgccactgcactccagcctgggtgacagagtgagactccatctcaaaaaaagaagataaaaaaaagaaaaccaataaagaaaatcagtgaaacaaaagccgattctttgaaaaggtcaatacaattgataaacttgtagccataatgataaatggaaataaggagagaagacacattactaacattaggaatgagagaggtgacatcactacagattctatagatattatgcacaagcttgtgccagtaaatccaacaacttagttgaaataggcctgatattgttaccagtggagaatgtccaggttcttcgcgttttgaacaaagaattggacaaaacacacaaagcaatgaaagaatgaagcaatgaaagcacagatttgctgaaacgaaggtacgccccacagactgggagtgggctggagcaagtggctcaagagtgctggttacagaaacctctaggggtttcccattggttacttggttagaccctatgtaaatgaagtagtggcctgcaaccagtctgattggttgcagaaggtgaccaatcagaggctgaagtgaattttcaaagttacacccctgtgcagatgaaggctaggcctgtgaccagtctgattgtttgcgggagaggacctatcagaagtactttccatttttcatctgcaatgcagaaagtgaggagggttggaaagagaacagcctctgatccttttgttacctgagtgtggaaagttagggttttccttttgattcacttctagtcagtctgtgcaaaccagccttagtttccctgcctccagaccctattctcctgccttaacattgtaatataataagaaatacatatttgctctctgctccaggtccttggcacagaactcctaaaactcttacaatttcctgagcaatcagttgctatgtacatcttttgttataatatttcatctttgaccgcagttcttgacccagatctcctaatctgttggaatttcctgggtgataggagtgtcttttgttctaatgaggcatgtcttggtgggcacctaagtgggtgctggtcaccagaaagaccaagccacagttagaaacttggaactttcagccctacccccatcctccaaaaagaggaagggggctggacatagggttaataattgatcatgcctatatgataaagcccacataaaaatccctgaagaactgtggggttcagagagcttctgggttgctgagcatatgtatgtgctgggagaggggcccagagagggcacgagagctccatgctccttccctcaagccctgacctgtgtgtctcttcatctgctgttcatctgtatcctttatcacatcctttattaatgtaataagtaaatataagtgtttccctgagttctgggagttgctctagcaaattattgtaccctcagagagggtcatgagaacctcaattcatagctggtcagccagaagtataggttgacaacctggaacctagaattggcatctgaagctggagtcaggcttgtgggcctgagactttaacccgtagcatctaactctaacgccagctccaggtaaatagtgtcagaatcagccaggcacagtggctcacgcttgtaatctcagcattttgggaggccgaggtgggcggatcacttgaggccaggagttcgagaccagcctagccaacatggcgaaaccccatctctactaaaaatacaaaaattagctgggcatggtggcacatgcttgtaatcccagctacttaggaagctgaggcacaagaatcgcttgaacccgggaggcggaggttgcaatgagccgagatcatgccattgcactccagcctgggtgacagagtgagactcttgtctcaaaagaaaaaaaaagtgtcagaattgaattgaatcgtaggacactctgttgatgtcttctggagaattacttgatatgtggggaaaccccccacccacattttggtgacatgaggtattctgtgttgagtgtgggagtaggaaagagagttttgtttttgctgtctcatacaggaaaatttcttaataggtataacctttcaaaacctcccctcaaacacacaacaaaacaaaacaaaacaaaacaacaacaacaacaacaaaaaccctctaggcccagatggcttcagtggggaattttaccagacatttaagaaagaaattctaccaactctacataaactcttccagaaacttgaaaaggaaggaatacttcccaactcatgctatgaagctggcaataccctgatactaaagataaagatattacaagaaaagaaatgtacagacaagtattgaattcaacaatatgtaaaaaagccattatgatcaagtgtggtttatcccaggaatgcaagattagtttaacattcgaaaatcaatgtaattcaccactttaaaaaactaggagggggaaaaacccctctaatcatgtcagtaatggaaaagcattaggcaaaacccagcctctattgctgatacaaacagcacactagaaatagaagtgagcctccttaagttgataaaaaatatctgcaaaaaacctacaggtaacatacttgctggtgaaggactgaatgcttccccctaagatcagtaacatggtcagggtattcactttcaccacttttattcaacacagtattgcagcttttagccagtacagttaggccaaaaagaaatacaaggcttctaaataggaagaagtaaaattgtttttattgatagacaatgtgactgtgtagaaaattcaatagaatctacaaaaaaatctcctagaactaatatgagttcagcaagcttgcaggatacaagataaatatatgaaaatctattgtatttctctataccagcaacaattggaaataaaaatatactgtttacaataacatcaacaatattaaataggaatatatctgacaaaagatgaacaatatttgtacactggaaattataaaccattgctgagataagttagttcttaactgagagtagagataaatcatgtccatgggtgagaggattcattagtgttgagatgtcagttctccccaaattgatctacagatttaaggcaatctcagtcaaaaccccaacagggaaatttacaagctgattctaaaattcctttttttttttttttttttgagatggagtctcactctgtcacccaggccggagtgcaatggcacaatcttggctcactgcaacctccgcctcccgggttcaagcaattctcctgcctcagcctcctgagaagctgggattacaggcacctgccaccatgcctggctaatttttgtatttttttagtagagacagggtttcaccatgttgtccaggcgggtcttgaactcctgacctcaggcgattgaaccacctcggcctcccaaagtgttgggattacaggcatgagccacggcacccagccctaaagctcttaaggaaatttaaaggacctagaatagccaaaacaattttgagaaagatcaacaaagttggcagactaacattacctgatttcaggatttactataaataaatctgtactttttaagacaatatggtatgggtataaacatagacaaataaatagatcagtgattcagccattccactcagagatatttacacaaaagaaatggaagcatattccatacaaagatttgtacatgaatgttttaaacaactttatttataatagccccaaactggaaacaacccacatttctaccaacaggtggatggataaattgtggtacatctttatgatggatgctactcagcaacagaaaaggaatgaactattaatccatgcagcagtgtagctgaatctccaaataatagtgcagagtgaaagaagccacactaaaaagtacagtgttatgattccatttatgtaaaactctggagaaggaaaactaatctggagtgacagaaaacaggtcaattttttcctgggaatgggaggagggagattgcacagaagcatgaagaagaaacttttggaggtgttggatgtttccatgatgttagatcatgcagatagtatgcttgtggttgttgtctgccttaaatacgttcagcttatggcatttcaattatgccttaataaagctgctaaaaaaaaaaaaactcactgggaaccttgtagcctctttcccaaccattctactcaaacttctctcatctaagacacactggccctttcttgcccgatccattatatttgtctctgtccttgatttacttaacttctcattgcacttgacttaggtgagcacctctttctgctagaaacacttttccttcttggcttctgaacagcacattctcttgggtttttcccctagctcttgtggctccaagtcctctagcaaacctcatttgttagggtcacctttgaccctatcttcctctctatttatactctactcagctccaacgttatcccacctagtcctgcaatttaaagcagcagcatctgtacatcccaacagaattttctgggataatagaaagagtccctatcggcattgtccacatggcagccactagccatctgtggctatggagtacttgaaatgtggctagcgtgactaacaaatgaatttcaaattttatttattttatttaatttcaatttaaatagccacatatggttagtggctaccgtattgaatagtccaggtctagatcactgtatgtttacaaactgtgggtgggaacacatttgctggtcttgacttttattttttcagaataaaataaattctatttttcacaaaatatttgtttcaggctggtatctccagggctcacacatagttgtttttttggtttggttttgtatgtaagttgaaaggcactgatctagatgccagtaatgtccatgttaatgttttcaaccatgagctgaggcccaaagtcatatttgtcatcctgacatctcatcacaaatctgtaagcctggtgtttttccctccagttttcccacacctcagcaaatggcactatcttttcctccagttgatgcggaacagtgaccttaattttctgctttcctgttccccctccccgccacaccctactcccacactcagtccagcagcaaggtctactggctctgcctcctaaatgggtcccgggtctacccacttgtttccatctgggtttctatcaacatactctaagcccatggcatctcttgcctggagtactgctgtagctttaaactggtctgtgattcactgttatcttcataagacccacagtggccaaaggaatcttccaaagccataaatcagatgctgctgctgccctactccagagcctccaagagctttccaccgtgatgctctgttgtcaccttactgtgcctatgaggccctggtgactgggcccagccctccgccacagtcaccctgtccattctgtgccagggacttccacttccttgcttatttatcttcagggctctgcacatgtgctgtgacctaggcccgccagatcttcccaagatggcccctctctgttaattcgtcttaactcagaggtgatttcctcaaaggagcagcacttctctgactaaatcagtgtctgtaacccaagttggagtgatagtattttaggagtaaatgagatacattgttactgaaatagagtgcttttgagtaataggagccaagagccatcaaagtattcttgactagagatccttgaattttctttgcaaatcatctgtaatcaacaaaatccttctgtgcaagtgatactgccaagtttctgtatggagaataaatattggtcttgctattttttaacttactcgactgagcaccccattatgcaaatttaatgagcagtttaaaatatgcatattatgcacaacatagtgtattaagatatagatgtataaattatgttaatataaaatttaaaatgagagtatttcattaatgtgaatatatcatatgcacaaggcaaatagcatttatttaaactttttaatctctgaaatttatgtacatcatggttagctttgtgagaaagtttgaatttgatttaggttaccaaatttgatttcaattatccaaatttaaatttgattgtcatgaagagaaagggtctgtagggtcgattattccttatgtaattttagtctttacttttgaaaatgtgttattaaaatagtgcagaaaaattaccagttattaacaaaataaattatagggtttgtgatttttgacctttgctttaaaaaaaaaacaagcttacattcaaatactgaaactttttgtagtagtcatatgcataacagattccaaaaacaacagaattgaaactgtatgtgcagaatactatgtattggttaaaccacataacacaggaggcaataggaaatgcatttacatttgcaaaatgaaaattgaatataaataggaaaatgtggcatgattttatcctagaaaattatttaaatcagaatagacagtgttcagaaaattaaaataaggcctccattttacttcacttgtatttcattctgtacaagttcagaaatggtggtgattaaaatatttaagtcactttacattcttctgggatagctctccaaagggaataatccaagctacagacaaaaatttatgtacaaagacattagttatggcattttttataattttgaaaagtcaggagccatccaaatatccagtggtgggaggaattaagcagattgtataacatccttacaaaaagattatataaccactaacattaatttttaggaagattgtttaatgtgggaaaaagcatctgacataatgctaggtgaagaaaaaggatatatttatatggtatgatcttaattaggtgaaaacaatatattttcttcaatatccatagaagaaaatatattaatagcagttaattctgaggactgcattgttgctggttgtattttccaggttttctagaaaaaacacatattacttttataatagggaaaagattattcataaaataaattttggtgctaatataatattaaatatttagggttactgtgctttatagccagagagtagtgcagggctcatttagtctgggagctcatgagtgaggattataattgataagggagattgagagctgtttttcagatggctccatggacagcaaagttcctcggtgtttttgctctcagatagtccctgatgtgctcagttctgtcacttactgactgtcgcttgctgatcagaaagtctgattggctgttagctttgtatttgacaaatataaaacaggaagaccaggtagttgttacctaataaatatgacttatctggtggccaaacattttaaaacaggaggcaacaatgagagattcctgattgtgtaaagtgggaaccattctggatcatttttcagtctttaggttctgatcgatttacaggtcatgaaatccttttagtgagtcttccctagcattactttgtaaatgaaattagagtagaatagaaataccagagtgcatggcatgtagtaagtatcctgtaagttttaatttcagatgtgtgtttgtaggtaccggattgtaacataaagtgtgtttttgttttggtgtggtttttttatctatagtttgctgtcaaaaaacttcaaagactcttagtgtgatctacaccagtggtgtgcagtattctccagtgataagtagcatcagtgtcacctgggagcttgtcagaaatgtaccttattgggccccacccagatctactgaatcacaaacactagtggtgggtcccagcactgtgtggtccttaatgagtccctgtcttagtagtcaattttctgttgctgtaagagaatatcacaggctgggtattttattataatagaggtttatttagctcacagttctggaggctgggaagtccaagagcatggcactggcatctggagagggcctttttgctgcgtcatgtcatggtggaggttgtcacatggtgagaggacaagtgtgtgccagctcaggactttcttcttcttataaagtcaccagtcccatcttgggggccctactctgatgaccttatctaatccgaactacctcccaaaggccctacctccaaatgccatcaacatattaatttgaggattaagtttccaatacatgaaatttggaggacacattcaaaccatagcagtccccctggtgattctgatgcacactcaaatttgaggcacactagtccagccttgccattcttggtgaggttcaaggactaacactggcatcacctgtgagctagttggaaatgcagaatctcagaccccaacctggacaggctcactcagaatctgtgagatcaccagttaatttatttgcatggtaatgttaaatagctctgatctcaacacaaatgcctcaggggccaagtaggtcatgtcagtagtgaaagtagcctggtttcccccgtaaagaaagtagaacaataagaaggcattgtggtgtgaagttttagtattcttgatttgtttttaaaaatcctgtattataccagtgggggttaacacattcaaccaaattcatcaactaaggttaactgcagttgacatcaattactttaagcagatttttaaacacagaattttaatagtgaccctcatattaacttcttctgatctcttttaggaatttatcaaagagctgctttctcggataagaggcatgaggaaactgagccctccgcagaagaagagtgtatgattctggaacagggtgaaactctcccagagacgaagaaagagtcctgggatttgtacttcatgaagacttttgtgaaagaataggtgtccttatgaacaacgtttttgtttttttttttttcttttttggtgtgaaggtgggggggtctattagacatttattcaagagcgttctttttttggttttaaaggtttttgttaatgtaatattttaatagcaaagatatcatgactctagccacagcctaaccaaggattatcaaaggaggtggacactcaaggaagggccacgccaggctgcgtttcctgcaaggactcagatgttcagtaccttatgatacagggaagatagttttcttacaagtagtttggtaatattttttttcttaagttgtacatttgactcagctgtcaaatttctcacacttgtatatatctacacacaactaagttaaaatgttgatgtgagttttatttcacatggatggaataaacttgtggttgtcctttaactggaggtcccagcacatgtgttttcaagaggccactaggcattcttcactgagtgctgctgacttcaacgttcactttatgcaccaaagtgaaagaattcagtgtatccgttattttaatgcactacaccacagaaatgttaagttggtcaagggcttaatttatggaatttctattatttcattggttgggatgctttgccaggtcatgtgcttattgtctcattttgtagtcttttaaagttgtatgaacccttaatttgaagaactaacttgatttctagagaaatatccacactatctcagtggtattttgcattggaaaaaggaagcactgtgtagcagtgaattgtctgctttccaccgagtactgtgtttattctctctccaggaaagcagatcaaaagaaagttagcagatcgagtgtcttcttccttagaaataggttctggtagcttctgtgcctgggtagtatcagaccagtgggagtaaaccgagtgttaagtgtcaaggtgagaaagcctcacattctctcaagacagttgctctaggagctgagttgctggtttggaagtgtggagattgcatttctggcttctctcaatggcttgtgttgaggactctgggtgctcctggccctaattgtgcaccctgatccccgtgcttggagctaggcctggtggcgtgctctagccctctcagttaccagctctttggagaaggatcaaaattcagatggaatgtgggatgggtaataggtgagagtagaaacccttccctccaggaggcccccgctgactcccacagaaacccacctaccataagatgtcttcaggtggccttgtccaaggatgggggtcaggcattttatatcaagggtgctctgaacatattttattttttaaaaaaactatgtttgtgaattttgcgtatactggcaagcttttgaaaatgtatttaattttgtattgtttaccaatgatttatttacaagatatttactcaaataaatggagctgcttacaa

SEQ ID NO: 303 - DNA, 49232 bp, Homo sapiens
aaaaaaggtccggtcccaggattggttgcgcaggcgcagggaaggatccgttttggcgggcggttggcgttgcgcagaaggcggcggcggtggtggcttgtggtgcggcctcaccatacaggaacagggcagacgttagcgtgagtgatcactctcaatcccgggtaagtggcagacagtcttatctacccatagtaggtcttgaactgactccatttgggcccgttattgtgtgaaatgaatggacggcggggtggggggatagtgaaggggcagcggtgggtcgggccaaccaatagaagaacagggggcgggatgttttaatccccgtaggttctttggagctgtgcagccgaagactttgactggcttgtgtataggccaattgggtctgccttgagctgccgactgatcggcccttgggccatcggaatgtgggagacgggttttccccttctgagcagcgtctcactgagccagtgagcaggaagcgcgcggtaggttgggcttctccaggaggcagcggtttgactccaatggggaatgcgggatcgggcggttaaacggatggaacgaatctggaaccagtagacggacagcctaaggaaagcgctgggaccagtcgtccaatcggctctccaaaagagggaggtcttcgatttggggttgtgaggaaggggagtcggtgcctgtaatggcgtgtgagggtggatgttttatccacgatgacttctctaacgaagcctttaggcctcagtcccatacacctccttgaaagcgtaagtttgctcctgtattcctcgacttgagcatttttcccccgccccctcaccacttgaggtttggggaacaggagttgtttttttttgtttgtttgtttttaaataatactttcagaagtcgcttctttaggaagactgttaaaatgttagaacgaatgggagaaatctctatgtactgtcatggaaaggcgttcaagaaatatctccttcctgatagtgcatatttctactgacaaatatgtttgtaggtccacagaaaagttttggaaagctacacaccaaagtgtcaatcctagggacacagtaggatcgaggcagattagatctttaatgtttaaaactttgcaaggttaataatttgtgattaaaattaaataaaaaatgaagtcgattgttttgtgtttctagtcataatcacatacttacaaccccttttctgttttatgtaatccatgtgcccagtgcttttattttagtctctttctcccgggaactttcatatatttcttttctttacaccattgaagatatcctaaagtccctctttttgctgttcctttgaggatatctgactttggaataaaaaagaaacaaagagggtaatatttagggttctggggacagaagattcatccatcacctggattattccttgccttttaattagatttccttcgaagtgtgttttacatgcagtctatctccttttggtaatgcccactctgcttattccaggatcttttggagaaataaataaattttgataacattggctgtatcagagtcttactgctttattcaataatttattcaggatcaagggaaaatatttaaatactgaaaatcaactacctatgaaatacacttataattagagacctttccgactttataccaaagacagacgattttaatagcagtttatgaacagaggagagatttccatgttctctggcactagcaaaaggacaaacctataatttatacctggctgtaaacctatttgtaggtatgctagtaatggagttgctgagcttctgagaactaaagtgatactggttaagggtatctgtcctggatttatttaggtttggaaggaatacagtcttgacctacagcaaggtttctcagcattagcactgttggtattttgaggcagataattctttgttgagggtgctcggagtgtcctgtgcatagtaaaatatttagcaacattcctggcctctacccactgtatgccagtaacatcgcatcactcgccacatccccatttgtgacagattgtttccagacattgccaaatgtccggggaggtagggatgggggataaaatctcccttggttgaaaaccattcatttaaaatactggagtatgcagggcacagtttcgtgttcctgtagtcccagctactctggaagctgaggctgaggtaggaggcttgagttcaggaggtcaagggtgcagtgtgagatgattatgcctgtgcatagccactgcactccagtctgggcagcacaacaagatcccattgctaaaaaaataaaaatagaacactagagtttattattttttcaaaatccattattttaccaattggaaaataggtaaaggtgagaagatggttgaaatgtttagggagtggcctttggtaaatggatcactaaatcctgatgttatctccttagatacagaattgatcattgttccatttaataaaaggaaatttttattaaaatttttaccacttggtctggcgccggtggctcatgtctgtaatcccagcactttgggaggccaaggtgggcggatcacttgaggccaggagtttcagaccagcctggccaacaaggtgaaacccgtctctactaaaaacaaaaattgggctgagcgtggtggctcatgtctgtaatcccagcactttgggaggccgaggcgggtggatcacttcaggtcaggagtttgagaccggcctggccaacatcgtgaaaccccgtctctactaaaaacacaaaaaattagccaggtgtggtggcgggtgcctgtaattccagctactcgggaggcggagtcaggagaattgcttgaacccaggaagcagaggttgcagtgagccgagattgcgccactgcactccagcctgggcgacaaagcaagagtccgtctcaaaacaaaaaaacccacaataattagccagtcatggtggtgggcgcctgtaatcccagctactcaggaggctgagacgggataatcgcttgaacctgggaggcagagtttgcagtgagccgagatgatgccactgcaccccagtctgggcgacagagtgagaccttgtctcagaaaaaaaaagtttttaccactttttgctgcttaaacttacacatacgattgattgcatcttgtccttgtttggcttcctaaaataatggcaaatatgtttttgaagaaggtagactttgcctcacatccttctttttcacttgattctagctagcctctttcttttcctgggattcttttggatccacgtctcaaaacttttttgaccgcaataagaaatatattttacactaatcctgtacacacattgaaacatttcactaaacgtgcagagtactctgatattcttttgtctgcagtatactatttcattgtcttaagaaagcagtcaatttccattgaactgatttcacagctgtttatagacccagggttttgggggaaaaagactgctgatctgaagaataggtcaccaaatcatgccaactttgattgctttctgagtcagttccttccatctccagccccagccacttgtacagatggtcccttgcttgtgatatttcgacttaagatttttcacctttacaacggtgtggaaagcaatttgcattcagtagaaaccatatttcaagtatccacataaccattctgtttttcactttcggtacagtaatcaaccaattacatgagatattcaacactttattataaaacaggctttgtgttaggtgattttgtccaacagtaggctaatgtaagtattctgaacacatttaaggtaggctaggctaagctatgatgttcagtagattaggtgtaggaaatgaattttcaatttttcatattttcaacctatgatgggtttatcaggacataaccccatcaaggagtatctatgtaaacagattaagcagtgacccattatttggtgtttttactcatgtgttttactttgaaagattataggagccaaaccgagactttctagtttactgtcgtgtgcaagtgaaaactgcttgttttattgtgaagtctcacaatgcttaaagagggaaaacaataaaaatattgcaaaatgtctcccaatgtgataggttttttttttttttttttttggaatggagtctcgctcttgttgcccagtctggagtgcggtggcacgatcttgactcacctcaacctccgcctcccaggttcaagcaattctcctgctccagcctcctgagtagctgggattacaggcatacgtccggctaatttttagtagagacggggtttctccatgttggttaggctggcctcaaactcctgaccttaggtgatctgcctgccttggcctcccaaagtgctgggattacaggtgtgagccactgtgcccagcctccaatgtggtagttaatagatatgatgaacttttctctctggtggtgaaattttagtgggtaatttttcattgaaattctggtactatcacagagttagaaatcctaacttccaatgtgatacgtgttgggcctctaattacagaagttataacgcttgtgcttagaacttagagacatactgcctgggcgcagtggcttatgcctgtaatcccagcactttgggaggccgaggcgggcagatcatgagttcaggagattgagaccatcctggctaacacggtgaaaccccatctccgctaaaaatacaaaaaattagccgggcgtggtggcacacgcctgtagccccagctactctggaggctgaggcaggagaattgctgagcctgggaggcggaggttacagtgagccgagattgcaccactgtactccagcctgggtgacagagcgagactgtctcaaaaaagaaaaaaaaacttagagacatacctactattgcaaccaaatctaaaaggggtgtttactaaaggggaatatattctgtctgaaaactagtaagtggaaagcttcaatttgggtagtaggtgagcaggatgatagttggggaaagaaagagtgagcctacatttgaagcggctggatttgtatatggctagggaaattctggagattctcagagcccttaacaatactctagaaaagagaaaggtttggtatcagggtacaaagatttttgaggaagactaagtcgctttttgtttctattgagatttgtttgtttttgagacagagtcgcgctctgtcacccaggctagagtgcagtggcgtgatctcggctcactgcaacctctgcctcccggattcaagcgatcctcctgcctcagcctcccgagtagctgggactacaggcacgtgccaccatgcctggctaatttttttgtatttttagtagagacaggatttcaccgtgttagccaggatggtctcaatctactgacctcatgatccaaccgcctcggcctcccaaagtgttagaattacaggcatgagccactgtgcccggctctattgaggtctttaaccacatagcatgatttccatatcttattggtatagcccatttaattaataactgtcctggtaaagcatttctagtctttattttgtccttttacttagattatttttatttccattcatcttacatgaaactgggcctaaagctgtgttatggatattgattttaaaagtaataaattacaacatgagataccacttgacttagtatggctgtttacatatctgctattcgtgaactcggactctgggcaatcatctttttctcctgatataaacttttatttttcttccttgcttatagagaatgattttaactgatcattgtactaataggaaggagtccaggtcatcctgagaagagttcgcttgtccagagtccaagatgcagatttgttggatttctgtaagccactcgaagccacatattcatttctgatgacagctttacacttgtgctggaagaacacccactgtgacaactgctgcctatgtttagtctgtccaggagctctaccaactagcatgtttgcagaaaaacctacactgttcttgttagcagctatgtaaatattagatctttctgagtttctcttctcagatctgccaatttctttggggcaaattgtatcctgcagtagcctcaatttaccctttgaaatgagggattaaaggttttagacattctttgggttatctgaaacacaattctttttggatcagtaatgttttatatatgtccactttatgatgtttaaaattttattccccctatgtattagtttcctgtggctgctataacaaattaccacagacttggtggtttaaaacaagaggaatttattcttctcaaaattttggagcccagaagtctgcaatcaagatattgaggcccctctggaggctctaggagagagactgttctttgcctcttttagcttctgattatggtcagcattccttggcatatctctctgttctgttttcacattgtcttctcttttgagtacttgcatcagaactctccctctacctgtgtattataaggatacatatgattgcaattaagaaaccacttggatgaaccaggataaatttctccaatcctatcttttaattcaacctgagagagcagatttaaaatatattttattcctaaagtggcaggtccctgaaaaaaaaatgtagattcatgtttattttgagacagagtctcgctttgtcacccagtctggagtgcattggtgtgattttggctcactgcaacctccgcctcccaggttcaagctattctcctgcctcagcctcctgagtagctgggattacaggtgcctgccaccgtgcccggctaatttatgtatttttgatagagacaggatttcaccagtttgccaggctggtctagaacccttgacatcaggtgatccgcctgcctcagcctcccaaagtgctgggattacaggcataagtcaccgcgcccggccggattcatcttttaatcacatcttttgctatataaaataacatttacaggttcaagggattaagataagaatctctttgggggagggccatcattcagaccactacacattggttccctaacctctacccaaatagatttgagctaattcagaaaagaaaatgttatttttaaagaaacagaggcaagtgaaaaaaggctcagaaacctgggttcttgtcctgcctctgccattatctaatggtgtaaccatgggtgagccatttgccctctttagtccttagtttctttatcttatagggaaggagttggataagtgatcgttaacaagccttctagacctaagactttatgaagtgattcctaagtcatcttggagtttgttttttaagtcaataatttaaaatgtgaatcaaaacattacaaattacaacattttgggtgagggtagtcctgttcttgcctaggacttgaaggatggaagactgagctgttggctgactgtcaactccttggggtattaacacaggataactaacctgtatttgttagctgtgtgcttaaacctttctgaagaaaagattttctacaagggatgtaatagactagctggaacattttcactacatttttagtgagactatagactgtgtagcctgaattttctttccagtagtagtagttcatcaaaattaaacactgacagatttttttctacctgaaactaggtcatagagtaaaaattttcacttgcagtcttactcttcagactcactgaatgcctgttccatcctgtttcattgctaggaaggacactagataaagccatgagcttgagatggtgtacttgaaaggaccgtttcaagatcaggttttataacacactcattatttatttcttctgtggagaggagaaaccaaattggattcaagtatttttctgatagtaatctatgtttcttagaataaagcaagttcatatctgagccagagggcataattatgtcagaataaaatataattatgtcggaataaaatgccctgtactaaagaggtcaactaacaggctgggaaatcttaagttttgtttttaagacaaatccttgaactctctgtgcctcgtttctcatccctaaatctgtgcaactcacctcacagggagttgtggagggtaatatactgctaatttgttcagtgtttcacaacaataaattatgcctaagatctgataaaacatagcaaacctcatttatgtaagtagagacaagcatggataagacttacagataataaagaaaattcattaaaatttttttaacttccttgattattaaacatttttccttctgtttcctatatattttccaaagtattttcctattgtttttccataatagacttatgagatagggcaaataacaaacaccaggttatataataaatgaataaattcatcaagcggacataacaatcctaaatgtcctaaaagctaataataaagcttcaacatacacaaaggaaaacagaaatgaagtaacaagccaggtgcagtggctcacgcctgtaatcccagcactttgggaggctgaggtgggtggattacctgaggtcaggagttccagatcagcctggccaacatggtgaaaccctgtctactaaaaatacaaaaattatctgggcatggtggcgtgcgcctgtaatcccagctacttgggaggctgaggcaggagaatcgcttgaacctgggaggtggaggttgcagtgagcggagatcgcgccactgcactccagcctgggtgacagagcaagactccgtctcaaaaaaagaaaagaaaaaggaaataacagacatctgcaattatatttggaaatttcagtgcctctcagtaattgataaaacaggtagatgaaatcagtaaggaaacggaagacttgaacaacactaccaacaacctgatataattgacatttatagaatagtacaagcaacagcagaatacatgtgcttttcaggtgcacatggaacttttacacagacagtttaccttctgggtcaataagtctcaaattcaaaaggattcaatcataaaggttttttaaaaaaatttaaacggggtcttgttctgtcacccaagctggagtgcagtgacacaatcaactcactgcagcctgaaactcctgggctcaagtgatcctcctgcctcagccttctgaaaagctgggaccactggcatgtgccaccatgctcagccacccacccttttttctttttttgtagagacagggtctcgttatgttgcccggattggtgtcagacccctgggctcaagtgatcctctcatctcagcttcccaaagtgctgggattacaggcatgagccactgtgcttggccaaggtatgtttatttcctgatcatagtgcaattaaataaaaaatcagtaacaaagacatcaagaaaaatccctaaatattttgaaattacacaacacacttctaagtaacccacctacaaagaggaaattacaaagaaaactaatacttggaactgaatgaaaatgaaaagatgatatatcaaaacttttagaatgaggctaggtgctgtgactgattcctgtaaactcaacgctttgagaagctgaggcgagaggatcacttgagctcaggagttcaagaccagcctgggcaacatagtgagacctagtctctagaaaaaattaaaaagtatccaggagtggtggtttgccagtagtcccagctagttgggaggctgaggtgggatgcttactggagcctgggagatcaaggctgcagtgagctatgatcctgccactgcacttgagcctgggtggcagagaccctatctcaaaaacaaaacaaaattgtgggatgcagttaaggaagtgcttaaagggaaatttatagcattaagtactttaacaacaaaagcaggtcactgacaggtttggccctgtgaacctagaaaaagaacaaattaaatccaaaataaacaagaaaatagtaatgataaaagcagcaattaatgggatatagaacaatagagaatagaaaaaaacggaaagttctttgaaaagatcaataaaattgataaatcaggaaaaaagatactaattaacaatattaggaactaaggaatatcactattgatcctacagataataagggaatattttgaaaaacgatacgaatacattcaatgtcttagttgaagttagtaacttccttgaagacaaactaccaaaactcacttaaatacagaaccttgggtgggcatggaggcttacacatgtaatctcaacattttgggaggccaagagttcaagaccagcccaggaaacataatgagacctctctacaggcaaaaagaagaaaacgtcagaaccttactagccctatctctattaaggaaaagggatttttagatagaaataatcccacaaagaaaacgccaggcccaggccaagcatgatggctcatgcctgtaatcccagcactttgggaggctgaggtgggtggatcacgaggtcaggagttcaagaccagcctggctagcatggtgaagccccgtctctactaaaaatacaaaaatgagccaggcatggtggtgtgctcctgtagtcccagctactcgggaggctgaggcaggagaatcgcttgaacctcagaggcggagggtgcagtgagctgagattgcaccaccgcactccagcctgggcaacagagcaatctctgtctcaaaagaaaaagaaaactctgagcccagatggcttcactgaagaattttaccaaaccttttaggaagaaataccaattttatacaacaaactcttccagaaaacagaagcaggaacgcttaaaacagttatttatttatttattttgagaaggatcctcgctctgtcaccctggctggagtgtagttgtgcaatctcgactcactgcaacctccgcctcctggggggttcaagcgattctcctgcctcagcctcctgagtagctgggactacaggcacgtgccaccacgcctggctgctgttttgtagttttagtagagacaggctttcaccgtgttagctgggatggtctctctcctgacctcgtgatgcgcccacctcagcctcccaaagtgctgggattataggcgtgagccaccgtgcctggcccaaaacagttatttttaacttcatctactatcagacatttaacttctatttgctttatatttttcaagtattttcttgtttttcccacaacagatgtttaagtagggctaataactaacacccatgagagtcaatgaagttgtccaatttgaccttttaatgatctagttgggttaggacccacatgtacttattcctgtcctgatctttccactattgacaagttaccttttaccttttctataacaacctttggagaagttgctaacttgaccaaggagaaacttcaaaaatcctcgccttaaaattggaaactggaatagactgtgctcatgcaatgcttgacactttttaggccctcaataaatatctcataatcaaccaattttagagcaaggatcagaattactatattaatcatatctttggcataggatttgaattgggaatgtagttggaaattggacaaaaagggagtcagaaaaatctcatgtaacacatcaaaacactcacttgaagagctgggtggtctgagattgcccatccctttagcatttatctgatgcctttctttgcatttaactgtcaatatagctgaagtttagagcacacttttatgatattgtggcatagtaactcaacttaaatgtcaatagagacacttgaaaagacctgcaaggttcgataacttctggtgtgggtttgtttctcctgtcatcacccattatgtattttttttacagcttttaaattcccacagagagaaattggtcaggatcataatacatggcccaggagctgccaaggatacccttgtatttttgttgttgtttgtttgagatgaagtctcgctctgtcgcccaggctggagtgcaatggcgcaatcttggttcactgtaacctccgtctcccgggttcaagcgattctcctgcctcagcctcctgagtaactgggattacaggcgcccaccaccacgcctgactaatgtttgtatttttggtagagatggggtttcgccatgttggccaggctggtctcgaattcctggcttcaagtgatccgcctgcctccacctcccaaaatgctgggattataggcgtgaaccaccatgcccagccagatgtcttctttaaactgatgctaagaaaacataaattgtcagctgtgtgctgtggctcacgcctgtaatcccagcactttgggaggccggggtgagtggatcacaacacgaggtcaggagatcaagaccatcctggctaacacggtgaaaccccgtctctactaaaaatacacaaaaaaaattagccgggcgtggtggcgggcgcctgtagttccagctactcgggaggctgaggcaggagaatggcatgaacccggaacatggagcttgcagtgagccgagattgtgccactgcactccagcctgggcgacagagctagactccgtctcaaaaaaaaaaaaaagagaaaaattgcctgacttaacacaggctcttcgttaaaatggatgatttgttgaaatgacctgaaggagcctttgtaacccttaagctactgatgtctaaaatgtgcaagctagatgatgccatggtaaagactgagtcttaattttatggctgacgtttggaaaatgctttatgaccataattttatttggggacaagtgttttcagtattcttttaatccttccatattttgtgaacatgatctgccaaagtggtatgtataaatctaagattcatgacaatctactcaaatgttgctgttacccatttttctcaagatttacttatgatgaaattgccaggttctttgtgaaaggtgacgaggtctccaaattcatgtttcattacacttaagaggagtggatgtgagattaacacccacctgagaatgtggtgccttaagatgagttcagtacatttccaaggataaagttgttggaaaacaccatctggaaggcattttcccatggtggtgccaaattctgctttctcataaatcttgaaacaattggatatttaacctcttgcccagtggtgggtttaggtgtaccctaactaaatttaaagaaaactgatacttttttttaatagggcaacatcttattctataaaatagaatgcgtgtttctgaaaactgatagttgagagaagaaattgagtggattttaataagagggtgaaaaaaaatccaatataaaatgatgagatatcaagcaagaatttttgtgttattgctaaatacaccagtttaccagactgataccttcaagcagttctgaaaattgagtcttgtagcccacattcatttgtaatatattggtaatcagagcctgggggacatacaaccaaatggaatttatagggcagcctttatcgtcatttagaatgtgtatatatacaattattattttaaatattgcggaggtctcactatgtttgttcatgctggtcttgaactctgggcctaagctgtcctcctgcctcaacctcccaaattgttgggattataggtgtaagccatggcacccagccaagtatatgtttttatatttatttttttattttttattttttttgagatgaagtctcgctctgtcgcccaggctggagtgcagtggtgccatctcagctcactgcaacctctacttcccaggttccagcaattctcctgcctcagcctcctgagtagctgggatttcagatgcccaccaccatgcctggctaatttttgtatttttagtagagacgtggtttcgccatgttggccaggctggtcttgaactcctaacctcaggtgatctgcctctcaaagtgctgggattacagggtgagccaccgcacgcagccgtttttatctaaaagaacaaaaggccctttactcccttgctcactgtagtaggaggtttcgcctggttttttttttttttaagacagagtctgcctctgttgcccaggctggagtgcagtggcaccatctccgctcactgcaacctccacctcccaggttcaagcgcttctcctgcctaagcctcctgagtagctgggattatagacgtgcaccgccttacctggctaatttttgtatttttagtaaagatggggtttcaccatgttggccacgctggtcttgaactcctgacgtcaagtgatcgatctgcctgcctcagcctcccaaagtgctgggattacagccgtgagccgttgtgcccagcctcttggcctgatttttaaaggatcatgaactagagctgtgctagccaatgggagaacatttcttgcctccatgctctcttcttttaataaagtttgtgttgtctatatgtggctcgttaatgataggggtgttaacgaccatagttaatctttctcttcaactctttcctaatctagtctcttaaacagacatttaaaaagcttttaactcctcttgaattgtgtgctcatgggcttttggtggaggtggagtgatagttatcagcccatttaacaaaacctgagacagccaggacagctgtaatgtgcatctctatgctgtgtttttgttaaaatgccacatggctaatactttggaaatcataaatccactgcaagaaaacatctttataggggatattttagttttatgctgtttgtgttacacacctaaaaccatcagtacttcaagctccataaagagcaaggaacatagagcagattaaaatgtttctgtaagtttggtttattttcatctgttttatttgctgcaataaggctatatagaggatgctttgaagacagtgctgtagctgacaatttaatcttcacctaagccactctctccctaagggccttaaggagaagtgggaatcgtgcaagtctgggccaactgcaaccactcatcaatggcatatctaattaatccatgtgatagggagctttgcatatgcgctctcctctgctctttaaccctggcttacttcctaaaggattttgcttagttagggggcttatagaatttatgttgaaactctacaatggagagctcattgattatgcatcttgacatttggtttgattaccatctttaattcagtgggtagttcagtgaggcagcttaccaattggctttctttttctttttttttttctttgagatggagtttcactcttgtctcccaggctagagtgcagtggcgcaatcttggctcactgcaacctctacctcccagattcaagcgattctcctacctcagcctccccagtagctgggattacaggcacctgccaccacacctggctaatttttgtatttttagtagagatggggtttcgccatgttggccagcctggtctcaaactcccgacctcaggtgatccacccaccttggcctcccaaagtgctgggattacaggcatgagccactgcgcccggctggctttcattcttaataagaagaaagcttagtgaaagatctagaattatgtgtacttttgctcataagtggtgatgaaaatgaaatgactataacaagataagaaaagccaccagaattggtattgagaagtagtgactgctttgtgggggtaaggcaggaggattgcttcagcccagaagtttgagaccagcttgggcaacacagtgagactgcatctcaccaaaaaataaaaaaatgtagccaggcatggtggcgtgcccctgtggtcccagctgctcagaaggccaaggtgagaggattgcttgagcccaggagtttgagactgcaataaactgtccgcaccactgcactgcagcctgaacaacagaacgaggccctgtctcaaaaaagaaatgactggagggatgagagtagaacctgaactggacaaagcagacagataccagggaccctatgtgggttcttccagcattaaacggtcaatgctgagggctaaccattacctcttttttatttgagacggagtctcacgctgtctcccaggctggagtgcagtggtgcgatctcggctcactgcaagccccgcctcctgggttcacaccattcttttgcctcagcctccccagtagctgggactacaggctcccgccaccacatctggctaattttttgtatttttagtagagacagggtttcaccatgttagccaggatggtctcaatctcctgacctcgtgagccactgcgcctggcctttttttttcttttttcttttctttttttttttttttttttttgagatagagtcttaccctgttgcccaggctggagtgcagtggcgcgatctcagctcactgcaacctccgcctcccgtttaagcgattctcctgcctcaccctcctgagtagctgggattacaggtgcgtaactgcctcagcctcccgagtagctgggattacaccacgcctgactaatttttttgtgtctttagtagagacggggtttcaccatgttggccaggctggtctcaaactcctgacctcatgatccacctgccttggcttcccaaagtgctgggattacaggcgagagccgctgtgccggcctacctcttgtttttctgggttgccctagcttgcttgtgatgccctctctgtaattgctgaggactgataagttttttgtttggtttttttttgagacggagttttgcccttgttgtccaggctggagtgcaatggcttgatctcggctcactgcaacctccatcttctgggttcaagtgattctcctgcctcagcctcccaagtagctgagataacaggtgcctgccaccacacctggctaatttttgtatttttagtagagacagggtttcaccatgttggccaggttggtctggaactcctgacctcaggagatctgcccgcctcggcctaccaaagtgctgggattacaggcgtgagccaccgcgcccagcctcttttctcatctcaatgggccttaggtgctgtaatctatagttattggtagctttaccagatagttcctatgtatatttaagagagaaggctgagagctgttatgcctgaaagactccagaaatttgagaagctactcaccctttcccttggagatttccacaaggataaggttgtgttcagaggctcatcttcttttcctctgtcatggtattgggattctatcttaatcactccatcatcctgccagccatgtctcatttctcatgctggaaagctccctcctcctaagctcagtgtgaaccaccagtcttgatgctttatctggtctaggctctagcccttaaattgtttgactggctttgtgtttcatttgaccctaatactccgggtcacactgtctaaaagagaattatgtcccctccgatgtctgagtgcatttctcatttcttactgctgctcctgagcagatctgtaacttcaaggttaagataagacacattccatcagaactatgtcgtcatccttgccagcttctgatctgtgactgtctaggagatttacaagacaattgcatgccatcctttaaagaatattatggttgtactctgactcctggcatcaggcccaattcgatttgtcagtggttacaaaacccatttcccaaaaagaaaaggacctcggcccatgtgccctttaggcagttcttaagggtggaaaggagggaattgaactcaatctttattttctgatgttttgtggggaggggtggacaccagaatatttttgtctctttcctcattaaattcacttttctttctctgaaaggtttcaccaaaatgttagtattgctgtcattctctcctgttccttattccttcacagagttactattagtcttttcattctgccatctttaaagtttgtctgagttttaaggaataagtattttgcccttgagagagaacgtacctaccctgttctctgaaggtttattcgttttccagtgcctagttaacaaagacactgttcctctttttcttgctatctactaatgtgttgagctgcaggagttactgcatgtgatatggtttactagcttaggaatttggaaggtcacatattttcttctgctgttgtattcagccctgacatatttttacagaaggttctttttgggggacttaatagatctttggtttcaacataaactcactttttccctcggaggtacgtagggcaggtagtacagatttatttagcccgtttaaatgatgccggggttagatggaaaatttatttactcaggataacacatggcaagttaatcagagtcaggatcctatttaaatgtttgttattgtttttatatcccttaattatgaaaagttaaaaggtaagagttgaaaaatgccgtttttaattggaggtttgctgatggtccattcaaatctgaggaaatcttttgtaattaaaaaatttctggccgggtgcagtgtctcatgcctgtaatcccagcactttgggaggcccaggtgggcggatcacaagatgaggaaatcgagaccatcctggccaacatgatgaaaccccatctctgctaaaaatacaaaaattagctgggcgtggtggcacatgcctgtaatcccagctacttgggaggctgaggcaggagaatcccttgaaccagggagttggaggttgcagtaagccgagatggcgccacagcactctagcctggtgacagagcgagactccgtctcaaaaaaaaaaaagaaaaaagaaaaaaatttctactttggtcttacaccctatggtttcttctgtttgacagtcgtaatagtcaccattgtgcttcttctcaactgagttcttttttttttttttttgagacggtttcgctcttgttgctcaggctggagtgcagtggcgcagtctcggctcactgcaacctctgcctcccaggttcaagcgattctcctgccttagcctcccaagtagctgggattacaggcaagtgctactatgtctggctaatttttgcatttttagtagagatggggcgtcaccatgttggtcaggctggtctcgaactcctgacctcaggtaatccacctgcctcggcttcccaaagtgctgggattacaggtgtgagccactgttcctggctcaactgagttctttgcttttgattgtccctttttcttactctcctatggcagccacttctggctttaaagttcccacatctataaagcagagtagagttttggagctctctaaaatgttctttagagccagaagaatggaaaacttacagtatttcaagtctctatatatcttttttatttatcctagtactccttttctcaagtattgagacatactgatacagagagttgtatattaataatgtatcaggtgatgaataattatttaaaaatctgttttataacattatagagcaacctataagtggtttaaatttatcaaccattaggttgtggcagaactgctctcctcttttttttttttaagcttcttaggaatttttttccacctaaattcattttgttttattttttcgagacagtctcactcttgtcgcccaggctggagtgcagtggtgcgatctaggctcactgcaacctctgcctcctgggttcaagcgatttctcctccctcagccccctgaggagctgggactatatgcgcctgccaccacacctggctaatttttttgtatttttagtagagacggggtttcaccacgttggtcaggctagtcttgagcacgtgacctcaaatgattgccccgtcccggcctcccaaagttctgggattacaggcatgagccactgcacctggccctccacctctaattttagttaaaaggggttttttttttttttttttttggttgttgttttggtagtgcttcatgtctttggattttgtctctagtaatccccccaaagaaggaaagttatatagtgtctttaaaatacttcccctcccctgtttcctgttatttttcccctcaagcaattttaattaactgttctgtgacagacggtaaaatgggattgcccaaagtgctctggtgggctggattaagtgatgggtggtttgtactgatcgtgttgtagaaggatcgagcctttcccctcccccttcagttgagctgtaatcttgttagatgatcttaaaatgttattgattaattcacagtgctgttagaggaataagcataaatactggatttaaaacctaagaagtaattcccttaagctctgaatgccttagccttgaggccaagagaggtaccttccaatttctccacccagtcttcactgaaaaggaaagttaagccttttaacttttccatttgcttctcccccttagtgtagtactgctgccagttgctatggcaacggactgggacagctgcgcagtggcgcccaggcagctgggtgggggcaggggagctgccagcccgccaagacccagacctgggaggggaggcccctcctgttagcccagagggaaagaaagaactggggcgatccggtaggtaaaggagggaacccccattcattttctacctttggggctcctcttctgcatgaaggtataaagggagattttccttgtctctccctcaaaatgaagaacacatgtaaatccttgtttttcctggtgaggcaggggaggccatagccacaatgcttaactgcatgcatctaacatggggctggttttaaccccagcgctctgacctaaactgctcagctcccggaaattccaaggtgagtggtggtgggggtggggtactctccctggaatatgacatttcctgtctctggtgaggttggaggctgttttattttaaataaagcacataagatattttcttgaagcttaggactcttctaaattcatggaaaaattattttaacccccccgcacctacattttgctactacttcctcttccaaatagagtattttaataaaaacttagtcttatagggcagtaatgggtataggcagttttttaggtgggcagacctatagctaataagttctggagatatggtctccaactatatattcttgtaataatttttaaaattttgctaatttgaagtgaattgataattgccactttttatgtgacttgaacatcattctgaggttagtagtgggccctccctgacccagtggttttctggtcagggtggaaatatttagagggtgctgataaacatctttaaagattacaggaaaataataatggagttcagctaagaaaacaatttctgctactctgtaatccagactgtaggcaccatttagcatggttaaggaagaattcttaaaaatgattatggaacaacaacatgggaatttttaaaactagattctctgttgagtaccccctggtgtgcatatttctgagcttaactcaatttccatttgtgtttccttgcttcagctttccttgggcctatgaatggttcctctgtattttgaggaggcttcatgttgatgctgagtctggggccagacttctttttcctcctcctcttcctttggccctgagtcaacttcagttaagagggagaggtaccttcttaactatttgggttagttgcatcttgggaattactgaataatctagtgactaattttgaattttaggactgaaaaattttttctcctttctgcctccctcccatccccaaattagctttctaaaaaggaagattagtgtgtttgagatgtcagccttgcttttgtgagctgatggatgctctgaagggacaagctcaatttgtttaagggaaatgtaccaagtcactgaaaatgtggtgaaaggtgcctaagcaagccttttttgtgtgctgctaagagactgggcaagatgctcagagcacagaaaactcatattttagtggcttttcttttttcatttttataaagacgcttattcaccttggagaaaaaggttttaattttatcttggttcatttaactaaagattttgcacatttctgtttgagttcctggcttgtaaacagttacaaacatagccaggaataacataccacactacttgtcttttggaatctgaaatagaagagttaaacagttgtgccttctaataattttggtctctttagccgaagaggaggttgtagttgaggaagtgaagactgattcatttttaaattaaactcttaggactcatctgtagaatgatttgagactcaagagcagggcacatggcaactcagtgttatccccttttcatcccatcaagaaaagacaaagtttttaactcctcacatggattctaaccattttgtcctttgcctttgcagggacctggtggccttagtctttcaggtggaacggtgtgcgacatgggaaagaaaaccaagcggacagctgacagttcttcttcagaggatgaggaggagtatgttgtggagaaggtgctagacaggcgcgtggttaagggacaagtggaatatctactgaagtggaaaggcttttctgagtaagttccttttttcccccaggcgttgggactctgtagagatagatacctttggtttacttccttaggaatcacaagcatttttgtctttttcttccccctcctgcactcttcctaagagttagaagacacagcagtaaagaaaacaaaatctctccgcttgtggagcttacgttctaatgatactgcttttgaaaggcagtataatgaattggttaggagcacagactcgagagtcagattgcttgggtctagattctaactccaccacttatgatacaaactggatggccttggctaatttccttaatcattttatctcctcagtgaaataaggataagcagtagtgcttataaggccaggcgtggtggcttgcactctaatctcagcactttgggaggctgaggcgggtggatcacctgaggtcaggagtttgagaccagcctggccaacatggtgaaactccatctactaaaaataaaaaaattaagtgtggtggcaggtccctgtaatcccagctactccagaggctgaggtaggagaatcacttgaacctaggaggcggaggttgcagtgagccaagattgcgccactgcactccagcctgggtgactgtgtttttagtagaggcagggttttgtcatgttactcaggctggtctcgaacttccaggctcaagtgagccacctgccttggcctcccaaagtgctgggattacagccgtgagccaccgtgcctggctgtgaaattaattttaataatattttatttaacctaatacgtgaaaaatactatttcagcgttaatcagtacaaaagttattaatgaaatttgtgtgtgtgtgtgtgctaagacttgaaaatctgggatgtattttatactttatagtgcatctccattcaaactagctgcatttcaaataggcacatgtggctagtggttaccatattggatggcacagctcctgcagtctaggacctaaatacactaaaagatacagtggtttaccaatacttttggataaaggctatgtgtcaagaacctttgaaacatactggaggttatttcattacatgactcaaggtttctcatctggagaattattggcgttgtaggtgggatcattcatgcattgcaggatgcttagcatctctagcacccagagtgcaagtatgggtagcacaacaatcagaagatgccctctgtttgtagagaggagtggtatcacagcttccactagagatgagaactgttaaagtttgagagacctctagagcactaacagataggaactaaagtaacaccagaagattttgaagatgtttattgggcccatttccactggaaatatttgggtgtttgaaagatacttgaaactctttctctgtcattgagctactggtaccttaccatagatgaaaggggaaaaggtaaggtttggggtagacaaagtaaacattggtcctttttcagaaatgccctggatttcataaaagactggaacaaatcagcattgtctataactaaatgcctactttgtgctagacagtgatcaaattctacctcttgtgctctcttcgattctcacaaaagcatttagagtccaggcatggtggtatgtacccgtggtcccagctactagggaggttgaagtgggaggattgcttgagtccaggagttttgggctgtagtgcactaaaccgatcaggtgtctgcattaagtttggcatcaatatagtgacctcccaggagtgagggaccaccaggttgcctaagtaggagtgaaccagagcaggtcagaactcccattttgagcattagtaggatcgtacctgtgaatagccactgcactcctgtctggttaacatagcaagacccttgcctctttcaaaactttaattctttttttaatttaaatttttacatatttttatctttttttttttttttttttgagacagagtctctcactatcgcccacgctggagctcagtggcgcgatctcagctcactgcaacctccgcctcccgggttcaagcgattctcctgcctcagcctcccgagtagctgggattacaggtgcctgccaccacgcccagctaactttttgtatttttagtagagacagcatttcaccatgttggccaggctggtctcgaactcctgaccttgtgattcgcccacctcagcctcccaaagtgttgggattacaggcgtgagccaccacgccctgcttttttatcttcaaaatagagacagggtctcactgtgttacccaggctggtctcgctctcttgggttcaagcgatctgcctgccttggcctcttgaagtgctgggattataggtgtgaatcactattcctggccaacccaggctctttttaaatcatactatgttgtcttttgggtggaaactgaagtagaagcagcagtaccaaagtgttaggaaaagggataatcgcattataggactggcttttctagctatcaacagattcttcccaacccccaagtgtattcggcttgtgtaatagtcttggtacaccttttgatattggtatgttaatttcctctgggatggtaaactatatggtctgtgggttttggggaaagttactgtgtgaggaattttttttcttgacttcttttctttttttgagacaagagttttgctcttattgcccaggctggtgtgcaatggcgtgatcttggctcactgcaacctccttctcccgggttcaaacgattctcctgcctcagcctcctgagtagatgggattacaggcgcccgccaccacgcccttctaaattttgtatttttattagagatggggtttcactgtgttggccaggatggtctcgacctcctgacctcaggtgatccacctgcttctgcttcccaaagtgctgggattagagacttgagccaccgtgcccggccgaggaattttttttctgctgagagaagggatataaaggagaaactttcccatattagctcaaatgatttagaaataaattttgtctcaatattatgttccttttgtagaaagttgtttaggtcaagagtaaatagctcagatttttccgtctttctgctttctacttgagtcaggttattatggcatgtgttcaaatcattcccatctaaataaaccttttttttttttttttttttttgagatggagtttcactcttgttgcccaggctggagtgcaatagctcgaactcagctcaccacaacctcctgcctcccgggttcaagtgatcctccctcctcagcctcctgagtagctaggattacaggcaggtgccaccatgcccgactgcttcagcctcccaaagtactgggattacacgcatgagccaccgtgcctggctgaattttgggtttttaaatagctttatcgaggtattatttaaacaccataacattcacccattgaaattgtacaattcaggctagatgcggtggctcacatccataattccagcactttgagtggccgaagcaggcggatcacttgaggtcaggagttcgagaccagcctggccaacatggtgaaaccccgtctctactaaaaatacaaaaattggtggcgcatgcctgtaatcctagttaccggggaggctgaggccgaagaatggcttgaacccaggagacaggttgcagcgagccgatatcacaccactgcactccagcctgcaagacagagtgagactccatctcaaaaaaaaaaaaaattgtacaattcagtgatttttttttttttttttttttttgagatggtatctcactctgttacccaggtgggagtgcagtggtgcaatcacggttcactgcagcctcaaccttctgggctcaagggatcctctcatttcagcctcccaagtagctaggactacaggtgcaagccaccatgcctgagtaatttttaaatcttctgtggagacaggagtcttgctatgttgcttaggctggtctttgaactgttgggctcaagtgatctgctcaccttagcctcccaaagtgctgagattacaggcgtgagtcactgcgcccagcccaattaaattattattattgtttttttttgagatagagtctcagtctgttgcccagactggaatgcagtggtgcagtcttggctcactacaaccgcagcctcccagattcaagcagttctcatgccctagcctcctgcgtagctgggactgcaggtgtgcaccaccaagcccagctaatttttgtatttttagtggagacagggttttgcaatattgaccaggctggtctcgaactcctgagtgcctctcaaagtgctgggattacaggcgttagccactgtgcctggctccaattaaatgatttggaataaatttatagagctatgcaaccaccactatgatccagtttcagaacatttttgtgtcccccaaaattctcttgattcccatttgtagttaattacaactccctccctcagccccaggcattcactgatctgcttttttttttttttttttttttgagacagagtctggctttttcgcccaggcaggagtggcacaatctcagctcactgcaacctccccttcccgggctcaagcaattctcctgcctcagcctcccgagtagctgggactacagatgtgtaccaccacaccaagctaatttttgtaattttagtagagacacggtttcactgtgttggccaggctggtctcaaactcctgacctcaagtgatctgcctgcctcggcctcccagagtgctgggattacaggtgtgagccaccgtgcccggctgatctgctttctgtctctataaatttgtctttcccagacatttcatgtaaatggaattagtatgtagtatcttgtgtcttatttctttcacttagtataatgtttttggggttcttccaagttgtagcatgttttaatattttgcttattgttgttggataatattcctttgtatggatataccacattttgtttttccatgtcaccatccattgatgaacatttgaatttgttttctgtttttggctattaaaatgctgctgtaaacaattgtaaataagtctttgtgtgggcttttttttttttttcatttttcctgggtagaaatctaggatcaaatttgttatcttctttaaagcatagggtttctctgtcctttttgtccgaatgtcctctttgaaataaggcattggatttttttcctcattctttaccccccccttttttttttaattttcccatttttcttacccagggagcacaatacttgggaacctgagaaaaacttggattgccctgagctaatttctgaatttatgaaaaagtataagaagatgaaggagggtgaaaataataaacccagggagaagtcagaaagtaacaagaggaaatccaatttctcaaacagtgccgatgacatcaaatctaaaaaaaagagagaggtaagcttcctttcccttttccccaaaaactattcttttgccaccaaaataataataataaataaaagtatcatattttggttatttctattgtaaggatggacctataaggtaaattgttgaacaaaagagcttccagggaggtatgttgattacagctccctctcctggctaagtgagaaatgtaatttgtggccactggattgtattaagggggcaaaattaaatctttgtaaaatgttaaaccactcctctgccttctccataagtagaagacttagttatcttagagaaggaggatcattggtgaattttttaagaatagaaaggggctttgaaatgttttgttttgttttgagacagagtcttgctctgttgcccaggctggagtgcagtggctggatctcagctcactgcaatctccaactcccggctttaagcgattctcatgcctcagtagtagctgggattataggcacatgccaccacacctggctgatttttttttttttttttttttttttgagacagagtcttgctgtcacccaggctggagtgcagtggcactatcttggctcactgcaagctctgcctcccgggttcacgccattctcctccctcagcctcccgagtagctgggactacaggcgcctgccaccacgcccagctaatttttttgtatttttagtagagacggggttttaccatgttagccaggatggtcttgataatttttgtatttttaatagagacggggtttcgccatgttggtcaggctggtcttgaactcctgacctcgtgatccgcctgccttggcctcccaaagtgttgagattatagacgtgagccaccatgcccagccggggctttgaaatgtttaccatttcacttccttttttctttttttttggagacagaatatcgctctgtcacccaggcttgagtgcaatagtgcgatcttggctcactggaacttccacctcctgtgttcaagcagttctcctgcctcagcctcccaagtagctgggattacaggcacacgccaccatgcccagctaattttttgtatctttagtagagacggggtttcaccatgttggccgggctggtctcaaaccccttaccttgtgatccatccaccttggcctcccaaagtgttgggattacaggcgtgagccaccgcgcccggccctttctttttttttttttttttttttttttttttttttgagacggagtctcgctctgtcgcacaggccggactgcggactgcagtggcgcaatctcggctcactgcaagctctgcctcccgggttcacgccattctcctgcctcagcctcccgagtagctgggactacaggcgcccgccaccgcgcccggctaattttttgtatttttagtagagacggggtttcaccttgttagccaggatggtctcgatctcctgacctcatgatccacccgcctcggcctcccaaagtgctgggattacaggcgtgagccaccgcgcccggccccggccctttcttttgttccagtgatagcatttgttttcaatccttgataatcttttttttgcagtgaaaatcatataatatacaattaaatattttatttatttatttattttgagacagagtcttgttctgtcactcaggctggagtgcatgggcgtgatctcggcttactgcaccctcacctcctgggttcaagtgattctcctgtttcagccttctgagtagttgggattacaggcatgtgccaccatagccagataatttttgtatttttatttttattttttatttatttttttgagacggagtttcactcttgttgcccaggctggagttcaatggcatgatcttggctcactgcaccctccatctcctgggttcaagtgattcttctgcctcagccttccagagtagttgggattacagacatgcaccaccatgcccagctaattttgtatttttagtagagagggtgtttctccatgttggtcagggtggtcttgaactccctaactcaggtgatccacctgccttggcctcccaaagtgttgggattacaggtgtgagccaccatgcctggctcaattaacaattttaaaatgtacagttcagtggcatttatattctcttgatctattatttctacatacttggcgtacaaaattaatttttgtcttttgaatcttcttcagtttgggaagtgtatttatgaaattttggtttgatttagttgctttaatccttctgatctttagctctcaagtaagtagcataagcactgttattgcctctctctcttttcatctgtgtgtgggcgcataaatacacacactctaccacctcctcccgcccccagcttccattccttttatttatttcaaggttatgaagccttttgtggtgaaggatgtatcatacactttacatttcataaaagcgtaagtctacttcggaatcttccagccttccagagtagctgccacaatcatccctatgtatcttcattctaattagatttatacctttctagagcattagttctcaatgctacacattataatcacctggggggtacgttaaaaaaaaaaaaaaatctccagtgcctaagatgcaccccagaccagtaaaattagaattttttttttttcttttttttttgagacatagtctcactctgttgcccaggctggagtgcagtggcacaatctcactgcaacctctgcctcctgggttcaagcgattctcctgcttcaccctccctagtagctgggactacaggcacatgccaccatgcctggctaattttttgtatttttagtagagatggggtttcaccgtgttagccagaatggtctcaatctcctgacctcgttatccgcccatcttggcctctcaaagtgctgtgattacaggcatgagccaccacacctggcctctgtcatttttaaaaaggagcagtctgaataatctggcttggagccactggccagtgcacagagttttgttcctaggccaggttctgaagctgccgaccttgaaaacaacccccacatgtcccttacatcataatgttcatctgggacccctgatagcattcttagcagtactggctgctgtcaggtagacagctggaaagataggtgattgtatgttttaaaggtataggaggggattgtgtttatttcttaagaccactggagaagaaatttgttagtttgcattatgcctgatttaagattactgcctgtatgatgattttagcattttcttcgccctggctccttttcagcagcttgaacgtttttcttccattcgcctcctcttccctccctatgtagcaaactgttttcagttgccagttatgatttacaacttagtccatgcaccagcattccagctgtgagcagctgtgtgcacatctgggaacttcttccccttaagcacccccaaaagaggctatgtttttaaaagtcagtatctctcattgatccacgcgtggaatgtccttccaattgtgaattttggtatctttggggaccacccggaccccaaatgctttgtatgtctcagaggaaagcaggtgaacataagatcaaagagattttattatgaaaatcgggcagtagagatttagttcatttgggcatctctaaatcttttttttgtgtgtgtgttgccactagagaggctagcattatcttccataataaagttttttcaaattacctagtttgggccgggtgcggtggctcacgcctgtaatcccagcactttgggaggctgaggcgtgtggatcacttgaggccaggagttcaagaccagtgtggtcaacatggtgaaaccctgtctcgactaaaaatacaaaaaattagccaggcgtagccgggtgtgatggctcacatctgtaatctcagcactttgggaggccgaggcagggtggatcacctgaggctaggagtttgagaccagcctggccaaaatggtgagacccctgtctctactaaaaatggaaaaattagccaggtgcggtggcacgcacctgtaatcccaactactcaggaggctaaggcaggagaatcgcttgaatctaggaggcagaggttgcagtgagctgagattgtggcactgcactccagcctgggcaacagagcaagactctgtctcaaaaaaaaaaaaaaaaaattagccaggggtggtagcaggcacctataatcccagctactcaggaaactgaggcaggagaatcacttgaacctggaaggtggaggttgcagtgagctgagattgcgccactgcactttaacctaggcaacagagggagactgtctaaaaaaaaaaattacctggcttgtataaaattttgctttttggctctcatcagtgttactacacatggatttgaacctgtgctccttgtctagattgtattactacatttagaccaagtttcaatactcatctcatgaattatcaaattttttctctctcttaagagacaggttctcactatgttgcccaccatggagcacagtggcgtgatcatagctcactgcaggcttgaactcctgggcccaagggatcctcccacctcagcctcctgagtcggagtagcacacttcaagtgtgcatcactgtgcccagctaatttgcagagacagttgcccatgttggtctccaattcctagtctcaagcaatcctcctatgtcagcctcccaaagtgctgggattacaggcatgagtcactgcaccaggccagttttttgtttttgttttcttttttgtttgtttttgttttcagtcacagtccggttctaccttctaatgctaacagtcatctacatccagaggggataggcactgaccagggccttctctctaaccaagcatataggtattggtgtttatgatctctgaaattttgctatttaatagtattggccttacataattcttacctctattcttccataaacacaggtgactgtgaaatgtgtcaaaattattgtttagtgttaaggtaaactaaaagtctaaaaaaataaagattgagagagaggtagtatatttgaagtttgtaaaatgaaaagatacagttagggtaaacatggtattctttaccatttcagaagcttatttacaatattaaggagattccaagtgagtgggattagaggagttcctagatgttgactccagagtatctttcttttcgccccttttcttttttttttttttttttttgagacggagtcttgctatgttgcccaggctggaatgcagtggtgcggtctcagctcactgcaacctccgcatcccgggttcaagcaattctactgcctcagcctcccgagtagctggggttacaggcacctgccaccatgcctggctaattttttgtatttttagtagagatggggtttcaccatgttggccaggctggtcttgaactcctgagcttgtgattcgcctgccttggcctcccaaagtgctgagattacaggcgtgagccaccatgcctctgactccggagtatcttataggacattagagacttttagggttcaccaccagtcttctggaggaattccaggaaagataatcacatcttacaaaaatatctcttgacatcactgtcacttcattgtcactgtcagtacttagtattaagttctaaaaatttttctgaattggtgaaagaaatgatatcaggagatattaacttaggttatgttttgttgagcctagaagcagggagtttctttactctttccacaagctgtaacctttctttatcttctatttatagcagagcaatgatatcgctcggggctttgagagaggactggaaccagaaaagatcattggggcaacagattcctgtggtgatttaatgttcctaatgaaatggtgagagagatttggcttcgctttacaattgtgtttctttgccagtgacttgaatttgtgtggaagatagggtggcaagactgcatattcccaaaccatgaattttgaatgtcagagatctttctttttttgagacagtgtttcgccctttgttgcccatgctggagtacagtggtgcgatctcactcagctcactgcagcctccgcctcctgggttcaagtgattctcctgtctcagcctcccgagtacctgggatgacaggtgcccgccaccatgcctggctaatttttgtatttttattatttatttatttatttatttatttttgagacaaagtctcttgttgcccaggctggagtgcaatggtgcgatctcggcttaccgcaacctccgcctccgggttcaagcgatactcctgcctcagcctcccgagtagctgggattacaggcatgtgccaccatacctggctacttttatatttttagtagagacagggttcctctatgttggtcaggctggtctcaaactcccgacctcaagtaatccgcctgcctcggcctcccaaagtgctgggattacaggcgtgagccactgcgcctggcccatttttgtatttttagtagagtcggggttttgctgtgttggccaggctggtcttgaactcctggaatgtcagagatccttaactgataccaattattggtgttaaatgggaattatgcttcagaatggattgctattaagtaaattatagtactacatatcagaaaaaaaggtaaatttgaggtagaaaatatataaaggtcggatgcagtggctcacacctgtaatcccaacactttgggtggccaaggcaggcggatctcttggggtcaggagttcgaggctagcctggttaacatggtgaactcctatctctactaaaaatacaaaaattagctgggcgtggtgacgcatgcctgtagtccagctacttgagaggctgaggaaggataattgcttgaacctgggaggcagaggttgcaatgagctgagatcgagcctctgcactcctgcctgaacgacagagcaagactccgtctctaaaaaaaaaaaataataataaatatatatatataaaacatgacttaaccacttgtttacacagttctgaattacttactgtaagaccatgggcctgtgatcctgggctaggaatcaaatgaggctttctgccatcactgagggccaaacctgctgaataatgtctaaaagagaaaaataatctcaacaaaaagcattaaagctaatactggccaaagcacaagttatttcatccagtagagagaggatggctcttagatgaaaaggaagtagttcttctcaatttgatttctttttttttgagacagagtctctttcgcctagagtgcagtggcgcgatcttggctcactgcaatctctgcctcccgggttcaagtgattctcctgcctcagcctcccaagtagctgggattacaggcgcctaccaccatgcctggctaatttttgtgtttttagtagagatggggttttgccatgttggtcaggctggtctcgaactcctgacctcaagcaatctgcctgccttggcctcccaacgtgctgggattacaggtgtgagccactgcgcccagccctaatttgatttcttaaagacagagtgatttatgttgtggtcctcactacctctgtttccaagtattctgaatttgtgatacatagagggtttgtgttgcagtgccactaaagaaacatgttaccttaaaagttgtataatcaaggccgggcgtggtggctcacgtctgtaatcccagcactttgggaggccgagacgccgagacgggcggatcacaaggtcaggagatcaagaccatcctggctaacacggtgaaaccccgtgtctactaaaaataaaaaaaaaaaatagccaggcttggtggcaggcgcctgtagtcccagctacttgggaggctgaggcaggagaatggtgtgaacccgggaggcggagcttgcagtgagccgagatcctgtcactgcactccagcctgggcaacagagcgagactctgtctcaaaaaaaaaaaagttgtataatcaaaaggcttaacattttatctgatgagagtactgctggtaaattacccagaaacctgtatttgaagaattgccatattctgtcagaagtaaggagctatatggactgcttgttttgttttgtttttttgagacagcgtcttgctttatcacccaggctggagtgcagtggtaccatctcggctcactgcaaccttcgcctcccaggttcaagcagttctcatccctcagccacctaagtagctgggattataggcatgtgccaccacacctgggcaatttttatatttttagtagagacagggtttcatcatgttggccaggctggtctcgaactcctgatctcaagcaatccacctgccttggcttcccaaagtgctgggattacaggtatgagccaccacgctgaggctggactgctttttaaaaattttattttagacagtgtctcgccctgtcacccaggctggagtgcagtggcgtaatcacagctcactgcagccttgccctcctgagctcaagttatcctcctacctcagtctcctgagtagctgggactacaggtgcatgccaccatggcctgctaatttttaaaaagttttttgaagagaccaggtcttcctatgttgccccgggctcaagtgcttttctcacctcggcctcccaaagtgctgggattataggtatgaggcgctgtgcctgggctggactgctttttcctactcagccatatgtggttacttacaatttacattaacattaattggctttttccaccatagtccaaatttgagtatctgctccaataaggtggtaatttttcttgtccacatctcaggataattctattttgttttttattatttatttattttgagacagggtctcactctgttgcccaggctggagtgcagtggttcaatctcagctcactgcaacctccacctcccaagcccaagtgatcctcccacctcagcctcccaagtagctgggaccacaagcatgcaccaccatgcctagctgatttttgtattttttgtagagatgggttttgccatgttgcccaggctggtctcaaactcctaggctcaagcgatccacctgcctcagcctcccaaagtgctgggattacaggcatgagctgctgcacctgagcttctcaggataattttaatttttttttaattgatttggaatcatgcttaaggaaccatgtagctagatttttttttgttatacttggtattagaggccctactgagataattgaaatttgtagctaaatttttatttgctcgttgttccaatccacagttctggccagaggggtaatgagtatttaaacggacacaaggtgaggagggttaagaccccttcacttagatgatctggaaactggattgaccaacctgtgtataattgacttgtgcataatcaatagagctgaatgtaggttttttttttttttttttttgagacggagtcttgcactgttgctcaggctagagtgcagtggcgcgatctcagctcactgcaagctccgcctcccgggttcacgccattctcctgcctcagcctcccgagtagctgggactacaggcgcccgccaccacgcccggctaattttttgtacttttagtagagtcggggtttcaccgtgtgagccaggatggtctcgatctcctgacctcgtgatccacccgcctcggcctcccaaagtgctgggattacaggtgtgagccaccgtgcccggcccctgaatgtaggtttgattgggttcactcacatgctcatattcacaaataaaaattttggaagcagattaatattatttattattcatctttttaacctaagcccaccatggtttacatctaaattctagctacagacatctgtttctgtataatatattagctattaatccatttacttacatttcttcttgaaaatattgaaagggtccttttcaccttgaaaccaaggtgaggaggaaatcaagtcaactaaatccatataatgacataaacgtatgtctggacagattctttcactcttcctctccttttaagtctcatattctttctctccaggaaagacacagatgaagctgacctggttcttgcaaaagaagctaatgtgaaatgtccacaaattgtgatagcattttatgaagagagactgacatggcatgcatatcctgaggatgcggaaaacaaagagaaagaaacagcaaagagctaaaggaggggatggtctctgtcatttctctttgtacataatacattcacctccctgcctcctctcctttctacccacccctttctatcctaaacacatccataaaaaatgtgcttatcactgtgctccacaggagaaatgttggtattggttctcttgtaacataactgatggtctgattaatgataagtgtctctctgtgaagaccaggcatttacatactgagtgtaatacccacaatttttttttcctttgccctgatctcttccttctgcttccctgtgacctcaagatgagtttcaactttttaatcaccttagagtcttgatcttttcagggttggtcgctttttaggttgggggattttgttacaatgatgttgaattttggtttcttgctttggttcttagaacatgttgctgactagctggcctttgttctgacatgttgagatggaaaggatgttgcccatctgttaaaaagccaatagcaactgcctacctgttggggctttcccaaccttgttcagctctacccaggagaatacagggtttctggtgtggtcttctgggccaccctctgttgttcatcctcactcatcctcccagaattactccatcctttggaagatttgaaattttacactgaaatctgtcaagacactctttttagccccaggactttcggtattgcttttagcactccccacttctgcttctgtaaagtgatatcaatttgtgataaaatgacaagattattaactgtgcagatttgtagctatagtacatgaggatgatggggtagggtacaattgtctttattatcatatatggtatgtatgtatgatttctttccattcctcatatttagactgtatatttatgtaggtgtgagtgattgcctggtgcttgcttgtgccaaggtgctaggcaccctccaaccctgccaacttttgtggcctcccaaagcattcctgttaccaaagaggcttcaaacctgaccctcacttctcagtggacccgagtttcccttccatgccattattttcagtggggaagttttagaggtgagctgttggccacaatatcaattttaagtgttcatagcagttatgtctcctgcattcttggctcctggatttaccaccaagagtccccaaaatattaatgctcttccctttttctaccctcaaacttatagttgtatcttattttttaaaatgaattttcatggccaggcacagtggctaccgcctgtaatcccagcactttgggaggctgaggcaggagaattgcttgaagccagaagtttgagaccagcctgggcaatgtagtgagaccccctgtctctaaaaaatataaataaaaataaaggcatgttcctgaaagactgtcaccttggaaagtgacaggccctggcattagcatgttgacacacccttttcttcttactcagcaaaatacttcgttttggtttcttcttgtgttgctattgagaaatttgtctgatcatatccttctgcctttgtcccccaagaaatgccctactttatccttttctttttgtagttgaggagggctagagaatcacaattaaaagtaaggaaatagcagggttttgaggatccttgtcccagccccaaagctgaggaaataagaataaatgcttaatatagccttaattctagagcgcaccagccatgaggctgcttttcttgttgtttttgatttttaaaacatacagctgtctggccaggagcatctaccatttctagattattcagagtaatgaggggaatggatggattgctccagtccacagatgagccacataatatgcaaatcatatacccattcatagcatttgttaacattgcttccctgctcagctgctgattgaattctgtgtgcttatataaattatgtcaaaaattatactgcataattgaggtgacagctgttgctgcagtgacatgacagactggaacaatgaagcttttggtttaagtcagccaggaaaatccttctgaatggtaatgtgattgggcaagagctcataaaccatacctcaagtgggtgggagttttatctctatattccttctctctctgaaggaattaaaggcctagatcaagtgctggataattgacaattgcttgtacttaatctgatcggtatctaaaagaaggaaaggatggtcaggaaacatttatcataaatgtagccaaggatatcaattagggtagacaagaataggacaaaaataggccagagctcctgaggaggtgatatgggtctcttgatttgcagaaaatgacagcctatccaagtggcccagtgtatgcctcccagtagcagtgggcatgtaaactgcagcgaccttatttttaaaaccaaaaacctagtatgtggacaaagaacatgacaatatttggtactgagattggttctgagaaacctggggcatgtggctgctgtggttataggtaatatttaagacattcataaaaatctgatattcttttaccgaaataaccccagtatcatctactacttaccatctgttaatagactttactctgtcttttttgtcttcggtttattgtactgagtgccgccaaaacaacttttgttctcttcctgcctacctgcagctggttctataggaatgtagggagccagaggccagtattgatttcagcccttagcacaaaggaaatcagatgcctgcttccagcatttgttagtgttgagtagatgttcttgccctagaagaattacagcctcaaacagaaacctgtttcatggagctttctcccctcagaagagttaatagttaagagctaagcactcttaaacacctaagtctcaaatgctaaaaatttatttttcttgtgtttagtcctctttcaagacatctttctaagcctttcagtaatcaacattaaaagatctccctttcttcagagttatagcacagctttgcccagtagaggctaccaaggacagcttagcagccctttgattgctgggctgggcagatggccttcaagttaagatcaaatgccgggaaaatcagcctacatgggagcacccattttaaacctggagagaaccatgatgttttcttcttcaaataacaatctagttttttttcccccagtactaaaattgtattgtctttcagacaatataatttttatttaaaattggaacatactatcttcatgctttctaagctaaatcttcatttagatttcactcctcagtagatcccagagaagaagctatataggatccagattcaaatttaacagtgtcttctacttttttagttatgttttctatcaactcctgctgccttttcaaatacggatatttttcaggagactcttctacttgtccactgactgtattttttcctttttgatccgtagccctggttaaatggctgacatccttccgtggatgattcttggaggtagtctcagaattccaaagtgattgtctgtcttcttcttgtcttgatcctaatgcagacattcacctctattatttatttattttttttagacagagtctcgctctgtcaccaggctggagtgcagtggcacaatcttggcttactgtaccctccacctcctgggttcaagcgattctcctgcctcagcctctcgagtagctgggactacaggtgtgtgccaccatgcccagctaatttttgtatttttggtagagatggggttttaccatgtttgccaggatggtctcgatttcctgaccttgtgatctgcccaccttggcctcccaaagtgctggaattacaggcatgagccaccgtgcctggccacctctattaaatttttgtggacaaaaataaaattgtcattatttgtttgctctcatggagcactttcagtaatacaattttttttaaattccagttgccctctttgttgctctgtcctctgtaatacctgactttgctaaagacttgaggggtggtttcagaggagggtcaggtgatgggaaggcaggatgagaaaagccctggacttgcatgtttgagaaggcttccaaccacatcttcactcagactcttggaattcctgtccccaaaacaagcttctgttttttgctcacaatgctatatttctaaatttttcctgaattactgagaagcagtcattagctttgttaagtttggtttggggacattgttggtatcaaaaatcgaagtcttattcatttgatgtaggccatgaatcatcaataactggttgctggaaagcttgactaccatccactggggtgctattttgagaaggatttttgggtatctttatagtctgcaattagttgatgattgctttctagtttatcaactgcatttatatttgcttttctgttcatggaaaatcctttatttgctggggttttttgtttgtttgtttgtttttcccacttacagcaagtaaaagtggtctgaggttatccttgtttttcttcgcggtttgccatgtgtgaaagtagatttcctgctattgatatattctcattatagacagaatagtggagaacagtgttgccatggacaaaatccagttttggtccactctggggagcatttggacctgtggtgcttctaacaattaaaagtctagatggtccttgactgtcccccagccatactgcatactactttgtgcattctactttgtgtcattaatgaaagattggttctgtccctgtaacttaggcatttattattcttaactcttcattcctgttctgtagccacccagcagtccattttccctatgttcaggccaaaccacagggcattggggaaggtttttgggattttcttattgagattttgttgaatctgtagtttaccccagctttcctaaggtacagtgaggggttggagggatctgtgtttggcccggggagcaattgtctctaccttaaggttcagttttgagggcataaaatactactttgcaatgtcatgagaacaccgttagatctgaaatgtggaaatggtttctcacaatttaaaggaaaaacccactttgcacccatgatcccatcattttggttgagattttagaataaaaaatatagtgttgagatccgtacttttgtaatcagaccaccaagcatgcctgtggcaaggcagagaggaaaggtctggagccagtgtattgcagtttcatgctacctttacctgctaatcataaaaattatgttttcaaaagtagatgatactagccttacacccaaaaacatgttctgaattagatgccccctcacccaatttttattaagctttctaaattccagccacattgctgtacatcaacattggtttcattcaacagacatttttttggcctgaagatacaaggttcagaaagaggccatccctgccctcaaataactttcatactggtgtatgatgaactgaccattaatagtttaagtgcttacaagctatgtttctgttcaaaaaaaaaatagtttggtataataaatgctataaaccaatacacatttctgacttgggggcagagacagactggctgatgttgtatagtttgtagccctggagtaagaagttgacattaatttcggcctatatgtggaaaagacctataacattgggtgaactgagccagctggccatagaacacaagaacatattccaggaaataaatatagctggagggttggaaatgctgttattactgagagagaaaacaggtgagttgggattgagaactcctgattttcatccctggtttagattcttggccaaagtagtggtagagttaatctttgcttgtggaaagcattaactatgttgcagattcagttgtgttacattattgtgggttctataacaacatattcctcatggacactttaccagagttgctcacacctttttcaatttctcatcccttttggaggaatgaacatgagacttaactgcctttaagcctaaaacggacatgctttccaatgacaagagattttctaaagagaagtcttggagcacatctgttaatacctgagcatctactctgagcagtgcagttttattcaatactggagagagggtgatttctttttttttgagacggagtcttgctctgtctcccaggctggagtgcagtggcgcaatctcggctcactgcaagctccacctcccgggttcacgccattctcctgcctcagcctcccgaggagctgggactacaggcgccggccaccacgcccggctaattttttgtatttttagtagagacggggtttcaccttgttagccaggatggtctcaatctcctgacctcatgatccacccacctcggcctcccagagtgctgggattacaggcgtgagccaccgccgggccgagagggtgatttctaagcagagaattgtatcagttatgtggaaacctttgccagaaatacatataccttgtatattaaatctgagtctcagatttaatcatcgaagcgtagctgggttaagaaacagtctgatcgtaaggatgttgtcgattctgacccatggatgaccacaagaaaaagatatttatttctgcctggataattgagagttgactaactttggaagtcagaattcccaggaattagagtaactgctctggaaagttaaagtgtgaagttttttagatagtttcataaaaacaattctggtttctttttgcttgtgctgactttcttggattttaatctacctcatcttgtctttttagagttacttcaacttgtcactttaacattgtgcttgactttggttgttttctaagatggaatttttcctgttcattgacagcttgttctcttgccttttcattctgatcctcatttcatctaacatcatctcatattgctcctctgtcaagagaaatgttttaaaatagtttaaagtcttgttttatgggaagaaagtgatcctccaatgctatttgtttctgaggtcagtaagagaaggagttaaaacaaggcagtggggaagggaatgaatcctgcactggaggcaaaagctgacaaggaaagagccattaattaagacaatttcaaagtcaactgattgtgatcattaatgtcacaatagatcaaaacctaattatcacagcctaggtaagagccatcagtattaatcggaaaatctaataggaaactattatcaagaaattaggccaaattgaatgcagtgaactttttatcttggcattctctatttttttgtgatgtcccctggcattggcaggtgtgaccctaacagtcgattcaaggccaagtggtcagtttgtcagccttttttaagggatttctttttatttttaggaattccaaacagagttaacctaaactgtcattgccaaaagatcagtcttaaactttcttagcacctgtacctgtttaatgtgatcagctatcagtgaggaaaaaaaaaaaaatctatttaggtcttggaatggttcctgtacctagagtatccatattgaaccttttttttttttttttttttttttttttgagatggaaacttgctcttttgcccaggctggagtgcagtggcgtgatcttggctcactgcaacctccgcctcccgggttcaagcagttctctgcctcagcctcctgagcagctgggattataggcgcctgccaccatgcccggctaatttttgtatttttagtagagacagggttcaccatcttggccgtgctggtcttgaactcctgaccttgtgatccgcctgcctcggccactcaaagtgctgggattgcaggcgtgagccagcacccggccacagtatctttattacagctcactgcagcctcaatctcctgggctcaaatgatcctcctgcctcagcctcccaagcagctgggactacaggcgcacaccacggtgtctggctaattttattatttaaaaaatgttttgtagagacagtctccctgtgttgcccaggctggtctccaactcgtgagctcaagtgatccacgtgcctcagcctcccaaagtgctgggattacaagcataagccaccgcacccggcccctagtgaacattttactgtatgtgttgataaatcatcttttgagtttctgttgtatgtggggacttcctacactggctgctgtgaagaggtatggaagaaaggagaggctttctgcctagaaattctttgagaacacctgaaaagacagtttaatcatgtcacaacactcttaaggctcaagtcagtgttctggtttccggtagctttaggattggattctaaacgagggctggtggtgagtttggtgtttgtctcgtgtcaccctcacccctcacctcctcagtttaggataagagacataatgatttctaccagaatccaaagtaaatccaaagggggagaaaagacataactgttttttcttctaccttttttttgttaaagagttacatctctcacaggaggaaagaattcaagagtctatatgattagttacagagaatattttcatcccctctccctgaatagaaaagcaggggtcaccatttgtatccttacccttgaggtgtttttgaagatgctgtaactcttgaagttgagctgaggcagaaaggttggaaaaatgcagccctctgggtattgtggggagggatgtgatgtagtaagagggtgttttgtggtgctaggattcccacgccaccaacttgcagctttataagagcgctaccaagaaccaccactggggaaaaggttcttattcattgtttctgttggaatgtgatcttgctttctggattttaggaattcaggttactcagtataaaactctgagaaatcagtgtgacttagtccttcacctcctaagataaagtgaatatttctttacaaaataattcatgtccttaatgttaaagatgtaattttattttcaaaacatctataacatgactttcagaagcagttcatttttccaagattcctcacattatactagataaataataggccctcagttaatacccttcagttattgaattaatctagtttgtggaatgaggtgtatcctgccaacttccctctgctcccaagtacactctgagaggtaaaatgctctgggaaatggaacaagaatcgagtggatgctgactctgtgtgcccacctcctcaactgattgataatggttgaccttgggcaagtcacttctttcaatgcctcagttccccatctgtcaaatggggttaataatactgacctacctcacaggggtgttgttgtgaggcattgtaaatcaaagttaatagaatacttcagggtcctctgtggaggatgtcttgagccagagtttaagcctgacacacaggctttggtcctcactgagctgtctccaagactggaactacttagtgactcggcaaattttctgccccccacccctcatcaaagctgctagttcagatgttgacagtgttttcatgaatgttggaatcttactagtccagacttacttaggatgttgttggggaaggcacttgggattttctgtgtcttgcattcacagagggaggccatttcagattcaagagcattggattagggaatcgtgaggcagggatgctactgcgtatttctctctgcaggttggggattaaagttcctttccccatgggtttgaagcagactcagactgtctcaggatcaaagcaaccctcaatggttttgatttatgtcattgcttaccactccccaaccaatcccaggacagctgggtcactgtacccctttgtggtatctgtacctgggcctctccttcctcatagggaccagctgattgaataaatgtgaccaccttatttccaccccccacccccaaaagctacattggaattatttttcctagaaatgtgtataacactcagaattgggcattgatccttaaagcttcatcccattcaccgtattcaacatctgtcatctcttagtgtctgcagtctgaacctaaccttgaccttttttccctctggtttgagaaaactttggacactatttctacttggccaggtgtgggctcaagagccttactctttccatctcagtttaggggcgcagccagctcctcttcccaatagggctctttctgctttccctctccttggccctagatttgtaatccatgaaaaagcacaaggtcctggctccttgcggtcacattctggttctctgtgttttgtggactctgctctcactgttcacccagcactagcagtaccagatggttctgtggagtcctggggaatggagagagcacagtctgactccctgccaagtagccaggagttgacttgcccatggtccgctggctttcccaccacttcctacaggatgggatctaagagactcaagagctgggtttctttcagcactctgtactgtcccaaatagcaaacaaatcactttgtagccagatttctgaatggaaatgagaaattgaattctccatggacttttaggtttatgggggagttttagctgtgtttcttggttttatttcagccaaacatgtctgcttttgattttttttttaaagtataagtggtctatatatatgttcaccttttaaatgtaaatgtttaaaaagtaagcatttatgtgtttccataactgacatctgatgcagacctcattctctccccctcttctaccctcctcttttcccccttttcatactcttgtattggttctaataaatggttgcttttcaaatatgga

SEQ ID NO: 304 - DNA, 31022 bp, Homo sapiens
gctgatagcacagttctgtccagagaaggaaggcagaataaacttattcattcccaggaactcttggggtaggtgtgtgtttttcacatcttaaaggctcacagaccctgcgctggacaaatgttccattcctgaaggacctctccagaatccggattgctgaatcttccctgttgcctagaagggctccaaaccacctcttgacaatgggaaactgggtggttaaccactggttttcagttttgtttctggtaagtgatgtttgacttcctattaattaggaaggattaaggagaaatcatgttttttaatatttgtaaagcaatttgaaagagaaagatgattccatgccgattattgggctcatcaagaccagttagttaaaaaatacaactgtgggtcagatgagaggacagaggcaaataacatgcaattgttcatgttgtcaaatcacaagtatttggaatttcaatctgttttcattttctgtcatctccctttctcttccatctcacttctaactactaccatgagtgctgatttctctctatctttcctatactggtcccatcaagatttcaaaaagtcactgaatgtttgagatgaaagtgatcttagagatcatctggcccagtactgaccactagaaatatagcaaaccacataatgtaattcctaaattttctaatacctacaccgaaaaggtaaaaataaacaggtgaagttaatatttaacaatataattcatttaacccaacatatcaacaaatcctttcagtatgtattcaatattgaaaatattaagaagctaatttacatatttttatttttactgagtctttcaaatctgatgtgtatatatacccacagcacatctcagtgaggactagccacatttcaagtgctcagcagccccatgtgggtagtggctgtggcattgcatagtgcagatgtaaaccaacttattgattgtacaaaggaaaataagacctagatgtcacacaatgaattgactgaattggcatcactcgaacccagctccccaatgacgttcaggccagaacccctttatcaccctttgtatgcacaatccctttctcctaacactctaacacctctctccactctcattcttccatttctgagccacagttgagcctggggctccctgtgtcctttctcactttcctagatcttcattcattactctttctcttttctcctgttttgcttttgggtcccacaggcaaaacagaagagagaaggtgtgatgcttctttttattcctgtctacccccccgccccccgaccaggtgctccagggaaaaatatgtggagtttccctggagggttgtttgttttacatttaacaaaagtgcttattttgtcaggttatcccatgacatattttaaatgctcaatgccttatattgagttccttttgcactataatggaaagaacactagtttaggagaaagggaacctggcaagtactttgaattctgctactaactgggtgatctcgatcaaattatttatcctctctagacttcaggtcctgtgggtgtgtaggtggggggaattgggcaggggaggggagcaggggattaataaagtgactagattagatacaaatataagggtgtttctagctctaaaatccacatttacctgcattttttccccctctcttattttttgctgggagagtttaccagctatgatggtgactcacatttaactctctagctttgaattttcatcccccaccaaaccagctggcaagcttagacttctcattatctctgacatatactcctatgcactgatttttaaataaaaaataaattacttaaaaatagttttattcctccttcctcccaggtcttgtagtttaccttctttgacgttcatagtggaggaaatgacagctaagatggggaatggaatgccttactcctagatatcactgtatttcatcatttgccttgcctacaattgatgatgggctgacacagttatttgcccctgtgtctctttgcgatccagaaatatttctgctccctctaaataaacttctctcctctgtcttccaaattcttgaggtgtctgtgactgttgactttcttttctttcaaagacgtttctctggaagacactcagctctggaaaagggtaactgagcaaaggaggcaggaagaaattgattggtaaagcaggttcggtggtgacacaactctgtagctagcacttattgatctcttactaagccccaagcattgcattaatcactttacacgcattatctgacgtaagcctcatagcattactataaagtaggtcctgttattatcctcattttgcaggtgaagaaattgaggtttagaaaatttaaatcatatgtctgtctgagattatagagctattaattggtgatgctacaacttgactccaatatcacactttaaatcactatattatagtactaaaggtgtgtgagtggtctagatctagggagtctgaataggccatgtcctaggctaaaggccctttgcctgttgtgctgagatggttctgactcatactgtggggcgagggatatatactagcgccctggagacctgtcgaattacagactagcacctccacacttgggctagagaccagttggttggtcctcaaggcaatgggcagtgagttccaaatttcacctttagccagtgcagagacagaacttggaacaggcaaaagcagtcttaagagctcaaaaaagtccaaaggaaaaatagattaatttgaaaaaagactcacaatctgaaaacagaaaaatgtgtgtcagggtgtaattaaaaaggcaggcccatctggaatggtttagttcttttcagttaggtattgttataggtgctaaatttgttctttgtttcttcagatatccatttattcacttattgccatcttttaggtgcaacagtttgaatgctctagtccaagaaatggcaaatgtttctgtaaaaatctagatagtacatattttaggctttgcaagccatatggtctctgtcccaactactctactccgtcattgtatcacaaaaacagccataaacaatacaaaaatgagtagcagtggctaagttccaataccactttatttatggtcactgaaatttgaatttcatataactttcacatgccacaaaatattcttctttcgattttctcaaccattagcaaatttgaaaatataaaatataaaaaacaattctgagcttgcaggctgtggcaaaacaggtaatgggccatgggcctcagtttgctgaccctgctctagtctaatgcatgtctcaaagtgctaactcactctgaaagccagttagatactagcaggattgcactcatttaaaatgaaaacaggtaaacacaaaatagccaaaacggcgacactattgctatccctatcccttatttactccttcccatactcaaatttcactttattctttgcatgtttttttttctttctctaggttgtttggttagggctgaatgttttcctgtttgtggatgccttcctgaaatatgagaaggccgacaaatactactacacaagaaaaatccttggggtgagtatcacggttgtcacggatagaatctctattgttttccttatctctgattccagcttctttgtgacccaatgccctgatattctctagggctagggttgccagaaaaagtacagaatgcccaactgactttgagtttcagataaatgacaaattatttttttatgtaagtatgctccaaatactgtatgaaacacaggtatactaaaatatttattttaaaaagtctgaagttaaaatttagcttagcatcctgtatttttattaaataaatctgataaccccatctagggcacactacccagacccaataaaggaaacatgcaataaagaaaactattaggcagttgttttcaaactggtttccagaaactcaggtgttcctacagggtatgaggggaaggctaactgggcagtgctcctgctcctgctcctgcccctatttcttttttttttttttttacaaggaggaactggtaccattcttctgaaactatttcaatcaatagaaaaagagggaatcctccctaactcattttatgaggccagcatcattctgataccaaagcctggcagagacacaaccaaaaaagagaattttagaccaatatccttgatgaacattgatgcaaaaatcctcaataaaatactggcaaaccgaatccagcagcacatcaaaaagcttatccaccatgatcaagtgggcttcatccctgggatgcaaggctggttcaatatacacaaatcaataaatgtaatccagcatataaacagagccaaagacaaaaaccacatgattatctcaatagatgcagaaaaggcctttgacaaaattcaacaacctttcatgctaaaaactctcaataaattaggtattgatgggacatatttcaaaataataagagctatctatgacaaacccacagccaatatcatactgaatgggcaaaaactggaagcattccctttgaaaactggcacaagacagggatgccctctctcaccgctcctattcaacatagtgttggaagttctggccagggcaattaggcaggagaaggaaataaagggtattcaattaggaaaagaggaagtcaaattgtccctgtttgcagatgacatgattgtatatctagaaaaccccatcgtctcagcccaaaatctccttaagctaataagcaacttcagcaaagtctcaggatacaaaatcaatgtacagaaatcacaagcattcttatacaccaacaacagacaaacagagagccaaatcatgagtgaactcccattcacaattgcttcaaagagaataaaatacctaggaatccaacttacaagggatgtgaaggacctcttcaaggagaactacaaaccgctgctcaaggaaataaaagaggatacaaacaaatggaagaacattccatactcatggataggaagaatcaatatcgtgaaaatggccatactgcccaaggtaatttacagattcaatgccatccccatcaagctaccaatgcctttcttcacagaattggaaaaaactacttcaaagttcatatggaaccaaaaaagagcccgcatcgccaagtcaatcctaagccaaaagaacaaagctggaggcatcacactacctcacttcaaactatactacaaggctacagtaaccaaaacagcatggtactggtaccaaaacagagatatatatcaatggaacagaacagagccctcagaaataatgccgcatatctacaactatctgatctttgacaaacctgagaaaaacaagcaatggggaaaggattccctatttaataaatggtgctgggaaaactggctagccatatgtagaaagctgcaactggatcccttccttacaccttatacaaaaatcaattcaagatggattaatgctcctgcccctatttcaaccaaagcagactatatctatctatgaacacctgcttacaattttaagaaagagtttggtttttttttaaaaaaaaggaaagtaaaaaagaaaaaacaaacacaacttgaaaacactgctgtcatggaaacatacctctctatcaaataggagggatacttaggggagtctcatgggtgctacagaattcaaggcctgcagaaaggagggctcaggtcaaggttacagaacctgagaagcttggggaagtggcagatcaaaaacagaagagggagggagggagtgggtagggcacaggggtgtggaggtgaccaggaggaagcacggagttgaggatggttctctcacaggctgatgaacccggatgctgcctggttagaagagcatatttgactgctacctctagtctattatgcaataacagatagaggattttaaatcactttcatcttgacagtgtcattttttcagtagcttttggtatcttcccaatgtacatgtttaaagacagcttgtccttttaaaaaatgcttttttctctctccataatcaaagaatccatgttgagatcacaactaatttgaacgttctgttcatggtttatttcaccctgctgttttccattttaaatgttcatccttgatccttctttagaaactataactccaaaggaggtattaatttgctttaaaaatagctttttactaagagaatgatgcaataaatgtgactagttattaacagcttgattactacatgaccaaaatgtcagcagcacaaaaataaattatgctgatgtcccatggacatttttttttcaaaattatttaaaaattgtttacatatgtagggggtataagtgcaggtctctttctttccttctttcttttttctctttcttcctttctttattcttccttccttttctttctctttcttctctctctctttctttccttccttccttccttctttccttctctctttctctctctctttcttcttttcttttccttccttccttccttctttctttctttgttttcattctttttattttgagacagggtctttctctgttacccaggctggcatgcagtggcatgatcatggttcactgcagcctcgactctcccaggcttcagctatcttcccacctcagcctcctgattagctgggaccacaggtgtgcgccaccaagcctggctaattaatatgccataatttatttaaacattccacagtcattaaaacatttaccatcactgcataactgcatagagctctcagccttttaagagaataacaattcattgcattgatatgccataatttatttaaacattccacaggttatttcttaaattcatgctcaccttgggaaaatacagggaacaatttgattcactatgaagtagagcagataagcagcagaggaagaagtttaaatccataatttaaaaacatttttttgccaggcgctgtggctcacgcctgtaatcccagcactttgggaggccgaggcgggcggatcacgaggtcaggagatcgagaccacggtgaaaccccatctctactaaaaatacaaaaaattagccaggcgtggtggcgagcgcctgtagtcccagctactcgggagactgaggcagaagaatggcgtgaacccagaaggcggagcttgcagtgagccgagatcgcgccactgcactccagcctgggcgacagagccagactctgtctcaaaaataaatacataaataaataaatactttttttttgtagacatgaggtctccgtgttgctcaggctagtctcaaaactcctgggctcaagtaatattcccacctcggcctcccaaaggccgggtattacaggtgtgagcgaccatgcccagtcacaagtgtaggtttcttacatgcatatattgcatagtgatgaagtctgggtttttagttacctatcacctgaatagtgaacattgtacccagtgggtcatttttcaaccctcactcccctcccaccctcccacattttgtagtctccaatatccattattccactctgtaggacatttcattttttaaatccctattttaaaaccttaattatcaataatgctgcttccaatgagatcaaagcacatattagtttggtgcaaaaattattgctattaaaactgtttgcaaaaaccgcaattacttttgcaccaagcgaatagaagtgtataagtaaaatgtgaaaatctccctcccatcctactccccagagatacacacacacacacacacacacacacacacacagggacacacacactgacataagctcacaaatgtatcagacacgcaggttttgtttttgaggtgggtactatcgtttattcactttttcattttcatatagtaaaatttgctgttttttggtatacagttctatgagtttgggtaaacacatataataagacacacagctttttgttttaaccaaaaaagggatcactttgtagatattggctggaaattgcttatgttaatatatctcagatatctttctttcttttttttttttttgagatggagtctcactctgtcgcccagcctggagtgcagtggcgcaatctctgctcactgcaacctccacctcctgggatcaagcgattttcctgcctcagtctcccaagtagcaggggttacatgtgcgaactttcatggctggctaattttttgtatttttagtagagacggggtttcaccatgttggccaggctgatctcaaactcctgacctcaagtgatccacccgctttggtctcccaaagtgctaggattacaggcgtaagccactgctcccagcctcagatatctttccatgtgagtgcctaaccagtggtgtgctgaaaccagctcataccaggttgcaatgccagttgcgtgcatctcttcccaactctgcattcagtggtgttcaatgacatcaagttagtgtcttgaaatctggcatggtgggagtatttacatcatcaaaattggcaaatgctggaaatcaggaatccccttcctcccaaaaagctagtcattaaaacatttaccatcactgcatcactgcatagagctctcagccttttaagagaataacaattcattgcattgatatgccataatttattgaaacattccacaggttatttcttaaattcatgctctgctcaccttgggaaaatacagataacaatttgattcgctatgaagtagagcagataagcagcagaggaagaagtttaaatccatagtcaattatgcattaatgacagcaggagttcaattataacaccagtgagtggagatctagagaaatgaacatacattggcatatttaaatgtgctgcaacgaggaaaaaatgttttctctaaaaagaattcatcctatacagatagccaccacagaatatggaactgtgaaattatagtcctatattttcaattcacttgccaattttagctttaagaaatctctgtgattcaaataagcaagtagtgggaaccaatgtggaaatgcaggatctctgagatgagcagaggaaatttactcagaagtggaacaggctgtctgtaccaaaaacagtcagggtgtgagtcagcagagggagaaaacacaggtcatgtggaaaagccagaaatggaaaacagtagggcagcttttgttcaccacattgcctgacattcttagccattatagatactaggcagatcttgtcctggcttattaaactaacatcacatgttcctgggtttacgatataaggaaaaatcaattttgtgcttcatagataattacaaaaaggccaagaaattgttaaccttaacccatacccctccttttagaaagtctttgacaggcacacaatgtaaggctggccagtcagcagaagtgcaacaaaaattgcctggctgctgctgtcagctcctctgctacaacattgtcacactccatagcagtcccaagttcatgaagtagactcagagaccggttgtacagagttgaggagagaagtcagatttagctgccatggagttaagcatattctgtccagcttatacctagtaaggcctgttttttggggctaaatgcttctttgaagcattgattccttgtctcctttgctagcagcttctactgctggatcaggttgttcttgatttatgctgcctggccacccaaggaaatcagcttaaaattttgctcctctgaagttctcccttctcaaatatctacctgtttaaaaattttgctccaagaggtttgctagtcttgactaaatttattcaatttttaaagacatcttaaatagaattggttaaaaattttaagtgtttttattatacaactcttatgtgcttataactgcaatattagaaaatacagaaaagaataaaataccatctgtaattgtacctctaagtatgagctttatttaaaatgcaaataaaggtatatatgatccttggccaggcatggtggctcacatctgtaatcccagcactttgggaggccaaagcaggcagatctcttgagctcaggagttccagaccagcctgggcaacatggcaaaaccctgtctctaccaaaaatacaaaaattggctgggtatggtggtgcacgcctgtagtcccagctactcaggaggctgaggtgggaggatggcttgagcccaggaggcagaggatgcagtgagccgatatctcgccactgcactccagcctgggcaatagtgccagaccttgtctcaaaaagaaaaatctatatctatatctatatctatatctatatctgatccttaggactcttttacaagtgacaaataacaaaattataataaagagtattaagtaaaatgttacagccatagaatgttttgctaacatgtaatcattaaatcctattctctttcatgttaataaatgtagtcaaacatttccaaactactgtcatgggaatttctcaactcaatattaaattcagtatgttttatgtattttgcaaacagagcctggcctgatggtgttagctactgagagagaggagaggcagctgtagccctgttcatttgcaggcctcagatgagtgggctgggtcagttgctcacgtgctagatggtgaaatgaagcagctgatggtctctttttctcctctgctgtagtcaacattggcctgtgcccgagcgtctgctctctgcttgaattttaacagcacgctgatcctgcttcctgtgtgtcgcaatctgctgtccttcctgaggggcacctgctcagtgagtcccaaccactcctaagtcaactttcacattaaagaaggagaccccagactcctcagtaggacagtccaacaccatgctcctaggaatggaagctagaagtctcctttggtagctaagggggtgggttagtgcgggtgagtattggcatgctatatgcaagacatattggttatgggttagtgaatttaataaagctggctggcgacatctgaccatgatcattctacatttgtagttttgcagccgcacactgagaaagcaattggatcacaacctcaccttccacaagctggtggcctatatgatctgcctacatacaggtaactcaggcaatccatgaatctgcagactccagggcattcagaatcttgcttcattcatccatccatatgcacattcaaaaaatatttatcgagcactgggcactatttgtcaggcactgttcttggcctgttttcatggagcttaagttctattcctttgggaacagagtaaatataaaaaagatctctccgcaatcgagggtttattgggcaccttctgtgcactcagcattctgctaagcactataatgtaggattcttctagtctagtggggcacacctgccatgatgttgctgagatgcctcttaacatttcttttcatctttccatttagctattcacatcattgcacacctgtttaactttgactgctatagcagaagccgacaggccacagatggctcccttgcctccattctctccagcctatctcatgatgagaaaaaggggggttcttggctaaatcccatccagtcccgaaacacggtgagttgactttctagcaaagcatctgagatctggtcatgagcaggaagtgcacaggtggacattgtgtcaggctgacatttctcctttcacagacagtggagtatgtgacattcaccagcattgctggtctcactggagtgatcatgacaatagccttgattctcatggtaacttcagctactgagttcatccggaggagttattttgaagtcttctggtatactcaccacctttttatcttctatatccttggcttagggattcacggcattgggtaagatcctcgaaccctcattctcatgccccagcccctgaccttgcataattctttgtcccaaaccatccttctttgtctatttcagtggaattgtccggggtcaaacagaggagagcatgaatgagagtcatcctcgcaagtgtgcagagtcttttgagatgtgggatgatcgtgactcccactgtaggcgccctaagtttgaagggcatccccctgaggtaagagccctacgggcaaggacagactcttgttaggagctgttactgttattattcttattattactcttattgttattatcatcattattattagttcagtcctgtgctgggtcttatgaaggatatctatggggttcctacctttaagaaacttccagtatcactggcaacaggcaattacaaggggatcttgaagagaaaaaactaatagttcttgcatgttgtgagaccctctgcaaaggtaataatgatagcccacattattaattgtgtttatcatctgccagccttgctgcataatatggattatttcatttatatatagcaatagcctatgagatattacttcttttttgtctaaattttgaaacaaaaggacaggattccaagagattaagtaaactgacaagctcttacagtaagtagtggagcttgaatacaaacccaggccttttggattccaaaggtttgaactcttgaccactatactgtcccaaagctcagccgtgatattccagtcaaattctggggggaaataaagcattcttgaagtgggctttctttggtgttctaagaatatgcttggaaatttttgttagatactgggtgattatgaaactgtgttctagggaactcaaggtgtgccccagggtaattcttgcggatattattatttacctttgcttgctcacaaaataggttatattgaggagtaaatggaaggggaaggttgatttgtggtgcctcagagtattctgagaatgattaaggtctttaaatcagattcaggattaagagcaatagcttagttctcatctggaacaggaaaaatatataaaacaaaaagtcttctaaagttggcattttaattcagcaggaaaaggataaatgaataatttttagcacaataagatcatcatctgggaaaaaagctatatcttcatttcacgccttgcactaaaatatgaatcgaggatacatgaagcaaaaaaaccataaaagcaccttaagaccacgtgggaagtttttttctaatactgaagtggaggaacatgtttctaaataagataaaccaccctgaagccataaaagaagagataattttgcatggcaaaagaaatccccatcgggccgggcacggtggctcacacctgtaatcccagcaatttgggaggctgaggtgggtggattgcttgagcccaggagtttgagaccagcctgggcaacatggcaaaaccccatctctacaaaaaatacaaaaattagttgggcatggtggtgtggagggtgaggtgaaaggattacttgagcctgggaggctgaggctgcagtgagctgtaatcatgccactgcactccagcctgggtgacagtgagatcctgtgtcaaaataaacaaacaaataaacaaaaattcccattgtaaataaagatagacaaaaaattaccaagtaggaaaagtatttacaactcacagggcatggactaattttctaatatataaataactcctagaaatcaataagaaaaagcctaataacatgataaaaagagaaacagaagatgtgaacagaataatctcagaaatggagatatatccttatcttaaatatatgaaatgatgcttaatgttattcataatggaaaaaaatgccaaataaaactacaagaatctgttaacctaacagattagcaaagattaaaaaacctgctaatgtatggtgctggcaagtgtggaaaaatgctcttatgcattgctggtgagagtgtaaacctatacaactgcttgtagagagtgatttggcagtagcaattaaggtttaaaactcgacttccaatttattccacaaatatacttaaatatgtgttaaattacatgcattaagttattcattacagcattgttgaatagaaaaaaagactggaaacaagtgtccatcagtggggaactagttacattttgggactttcatgcagtggaatagtctgcaaccagtaaaacgaaagagacagtaccatagacactaatagggaccagtctctaagatgttaaatgcaaaaggcagggcagtgtgtagagtctcctatcatttgcattgaaaagatcatttaaatgcatgttctccagaagaattcacaaaataataacattacctctggggatctggaggggcaggaggatttgctttttactattgtactgttgtactttcagattttgtaccatatacatatattacctatttagaaagtaattttctaataagatagatagaatgctagctacacaaataaagaatagaccactagctacactaataaagaaaaaagagagacaatccaaaaaacacaatcagaaatggcaaagaggacattatgactgaccgcacagaaattaaaaaaaaaaaaaccctcagagactactatgaacatctctatgcacacaaactaaaaaaaaaaacaacctagaagaaatggataaattcctggacacatacaacctcgcaagaccagaccacgaagaaatttaatccctgagcagaccaatattgagttccaaaactgaatcagtaataaaaaagcctacaactaaaaaatgcccaggaccagatagattcacagccaaattcttccagatgtacaaagaagatctggtaccattcctactgaaactattgcaaaaaaattgaggaggagggtctccttcctaactcactctatgaggccagcatcatcctgataccaaaacgtggcagagatacaacgaaaaaagaaaacttcaggccaatatccctgatgatcattcattgatgaaaaaatcctcgacaaaatactggcaaactgaatccagcagcacatcaaaaagctaatccaccacgatcaagtaggctttatccctgggatgcaagtttggttcaacatatgcaaatcaataaatgtgattcatcacataaagagaactaaagacaaaaatcatatgatcatctcagtagatacacaaaaggctttcaataaaattcaacattccttcatatgaaaaactctcagcaaactaggcattgctggaacatatttcaaaataacaagagccatctatgacaaacccacagccaacatcatactgaatgggcaaaagctggaggcattccccttgaaaactggaaaaagacaaggatgcattctcttaccactcctatttaacatcgtgctggaagtcctgtccagagcaatcaggcaggagaaagaaataaaaggcatccaaataggaagacaaaaagtcaaactatccctgtttgcagacaatatgattctatacctagaaaaccccatagtctatgtccaaaagctcctagatctgataaacagcttcagcaaagtttcaggatacaaaatcaatatacaaaaatcagtagcattgctataccccaacaacacccaagctgagagccaaatcaagaatgcaatcccattcacaatagccacaaaaaaaataaaatacctaggaatacagccaactagggaggtgaaagatctctacaatgagagttacaaaacactgctcaaagaaattagagatgacacaaacaaatggaaaaacattccatactaatggataggaagaatcaatatcattaaaatggccctactgcccaaatcaatttacagattcaacactattcctaccaaactaccaatgacattcttcacagaataagaaaaaaaaactatttcaaaattcatatgaaaccaaaaaagagcccaaatagccaaggcaatcctaagcaaaaagaacaaagctggaggcatcatgttacccaacttcaaactatacaaggctacagcaaccaaaacagcatagtactggtataaaaacagacacacagactgatggaacagaatagagagcccagaaataatgttgcatatccatgaccatgtgatctttaacaaagtcaacaaaaataagcaatggggaaaggactctgttcaataggtggtgctgggataaccggctagccatatgaagaagattgaaactggactctttccttacaccatatacaaaaaccaactcaaaatggattaaagacttaaatgtaaaaccccaaactataaacaccgtagaagacaaccaccctggaagacaacctaggcaataccattcaggacataggccctggcaaagatttcatgatgaagataccaaaagcaaatgcaacaaaaataaaaattgatgaatgggatctaattaaactaaagagcttctgcacagcaaaagcaactaccaagagagtaaacaaacaacctacagaatgggagaaaatatttgcaaactacacatccgacaaaggtctaatatctagcatctataaggaacctaaacaaattaacaacaacaacaaaaaaacacaaattatcccataacaaagtgtgcaaagtctcaaaaaaaaaaaaaaagtgggcaaaggacataaagaaacacttttcaaaagaagacacacacgcagccaacaagcatatgaaaaaatgctcaacatcgccgatcattagagaaatgcaaatccaaaccacaatgacacaccatctcacgccagtcagaatggctattattaaaaagtcaaaaaataacagatgttggtgaggttgcaaggaaaagggagcacttatacagtgctggtggaaatgtaaattagttcagccattgtggaaagcagtgtggtaattcctcaaagaattgaaaacagattaccgtttgacctagcaatcccattactgagtatatacccaaaggaatataaatcattctatgacaaagacacatgcacttgtgtgttcattgcagcactattcaaaactgcagacatggaatccacctaaatgcccatcaatggtagactggataaagaaaatgtggtacatatataccatggaatactacgcagccataaaaaataacaagatcatgtcctttgcagcaagatggatggagctggaggccattatcctaagcaaactaatgtagaaacagaaaaccaaatatcacatgttctcatttataagtgatagctaaacattgagtacatatgcacacaaagaagggaataacacactggggcctacttgagaatggagaaagggtggagagagaggatcaaaaaactatctaatgggtagtaggcttattacctaggtgatgaaataatctgtacaccaaacccctgtgacatgtagtttacctgcaaactgcacatgtacctctgaacctaaaatagaagttaaaaaaaaaagtaattttgggtggggcacagtggctcatgcctgtaatcccagcactttgggaggctgaggcaggaggattgcttgagctcaagagttcgagaccaatctgagcaacataggaagaccttgtctctacagaatattaaaaaattagccgggcatggtggtgcacgactctggttccagctacatgggaggctgagatgggaggatcacttgagcccaggagattgaggctgcagtgagctgtgatggcaccaccgcactccagcctggttgacagagaaagaccccatctcaaaaaaaaaaagtaattttggaaggacatacctgggatatgttaatagcacatttcatttctaaagtcagaggaaattataagatcataaccagggatctgtattagcggactagtagacaagaggaccttaaagatagggagctattgcctttccgcccgtgtacgccactgaagaagcatcgttaaagtctctcttctcccttccatcttgtctaagtcagagtctcctaaagagctcaaacagctgaggaagctcttcattggagatttgagctttgaaacaactgacgagagcctgaggagccattatgagtgatggggaatgctcacagactgtgtggtaatgagagatccaaacaccaagcgctccaggggctgtgggtttgtcacatacgccactgtggaggaggtggatgcagccacgaacgcaaggccacacaaggtggatggaaaagttgtggaaccaaagagaactgtctcaagagaagattctcaaagaccaggtgcccacttaactgtgaaaaagatatttgttggtggcattaaagaagacacggaagaacatcacctaagagattactttgaacagtttggaaaaatggaagtgattgaaatcatgactgaggcagtggcaagaaaaggggctttgcctttgtaacttttgacgaccatgactccgtggataagattgtcattccgaaataccatactgtgaatggccacaactgtgaagttaggaaagccctgtcaaagcaagagatggctagtgcttcatccagccaaagaggtcgaagtggtcgtggaggtggttttggtgggaatgaaaactttggttgtggaggaaacttcagtggtcatggtggctttggtggcagccatgatggtggtggatatggtggcagtggggatggctataatggatttggtaatgatggtggttatccaggaggcggccctggttactctggaggaagcagaggctatggaagtggtggacagggttgtggaaatcaggacagtggctatggcaggagtggcagctatgacagctgtaacaagggaggcagaggcggctttggcagtggtagtggaagcaattttggaggtggtggaagctacaatgattttggcaattacaacaatcagtattcaaattttggacccatgaagggaggaaactttggggcagacgctctggcccctagggtgatggaggccaatactttgccaaaccaccaaaccacagtggctatggcggttccagtagcagcagtagctatggcagtggcagaagatgttaattgggaatcaaagcttagcaggagaggagagccagagaagtgacagagaagctacaggttacaacagattcatgaactcagccaaacacagtggtggcagggcctagctgccacaaagaagacatgttttatacaaatactcatgtttatgggcaaaaaagtcaaggactgtatttgtgactaattgtataacaggttattttagtttctgttctatggaaagtgtaaagcattccaacaaagggttttaatgtagattttttttgcacccatgcaaaaaattgctatatgtgatagtctgatcatgacactgaataaatgtcttttttttttaatgtgctgtgtaaagttagtctacactgaagccatcttggtaaatttccccaacagtgtgaagttagcattccttcagggtgatgccaggttctatttggaatttatatacaacctgcttgggtggagaagccattgtcttcagaaaccttggtgtaattgaattgatagttactgttgtgacctgaagttcaccattaaaagggactacccaagcaaaatcatggaattattggttataaaaataattgttggcacatcctatgcaatatatctacgttgaataatggtaccagataaaattatagatgggaatgaagcttgtgtatcatccattatcatgtgtaatcaataaacaatttaattctcttgaaaaaaaagatagggagctatttaaagattattaggaaagcttactagctaagatggttaataccttgtcttatcttgcacatcagcttctgtctttttctcatctattacctgagttaagttatagttggtctatttggtatccttaaaacttaggggttgctttggttggtcgtgtaatactctaagagagagaataccagttttgccacctgaatgtattgctttgtttcttccataaacatttaaaaaatactctctccatattcaccccatttaaaaattagaaaaataatatacatttattgtagaaagtttggaaaatacaaaaaatactagaagtaaataaaaaatttcatagagttctaccacctagaggaaataatgtttttccttgattgatataatggatgctttcctttgaaacatttttttttgttttgagacagtctccctctgttactcaggctagagtgcagtggtgtgatcttgtctcactgcaacctctgcctcctgggttcaagtgattctcctgcctcagcttcccaagtagctgggactacaggcgcgcaccaccacgccctgctaatttttgtatatttagtagagacggggttttgccacgttgaccagactggtctcgaactcctgacctcaggtgatccacctgccttggcttcccaaagtgttgggattacaggcgtgagccaccgcacccggccttgaaacatttgttttaaaatagttggccaggagtggtggctcatgcctgtaatcccagcactttgggaggctgaggcaggtggatcattcgaggccagcagttccagaccagcctggccagcatggtgaatctccatctctactgaaaatgcaaaaattcgccaggtgtggtggtgcatgcctgtagttttagctaattgggaggctgaggcaggtggatcattcgaggccagcagttccagaccagcctggccagcatggtgaatccccatctctactgaaaatgcaaaaattcgccaggtgtggtggtgcatgcctgtagttttagctacttgggaggctgaagcaggagagttgcttgaacccgggaggcgggggttgcagtgagccgagactgtgtgactgcacggagtgagactctgtcaaaaaaaaaaaagaaagaaagaaaggaaggacgcaaggaagaaagcaaggaaggaaggaaggaagaaaagaaagaaagaaagaaagaaagaaagaaagaaagagaaagagagagaaagaaagaaagaaagaaagaaagaaagaaagaaagaaagaaagaaagaaagaaagaaaggaaggaaggaaggaaggaaagaaagaaaaagaaagaaagagaaagagaaggaaaatatgtgtatggtatatataccattttaatcatttcttaaagtaaacattgtggccattactttactcgtgcataatactttttcacaccttaattatttatcttcatttcccagaagtgaagttccagggtaaaagagaaggaatgcttttgaggctattgagacatactgctcaactgctctctgggaagatgttgccaatttgcattttcacccctgtgaaatgcatgttcaatttgcatgcccacgtgaacactcccatttccctgaatcccagttaatgctgggcattattaattaaaattgtttttcaatttgagagactaaaatggtatcttgttttaatatttattactctgactatttctgaggccaatatttttttcacattgttattatccatttcttaaatatgtttttcctcaaattgagctggggaattttcttcaaataagaaatagcactgaattgcataatgttcactctgtttgatttgtcccatctctgcctcttccttccctagagatactcaaggaagttatttgcttgcaccagcttaagaaacctcacttcacacagtcccaatgtatcacacttgagcaactgtgcaagaaaggacataatttagtattgctaggaagtatatttttagtagttcctgtgcaggtagaagcaaactgctgctttgcaaagatctcagggatagaaaagctgctttatttatttatttattttatttattttgagacggagtctcactctgtcacccaggctggaatgcagtggcgcgacctgggctcactgcgacctcctgggttcgagtgattctccttcctcagtctcccgagtgtctgggattacaggcacccaccaccacactcggctaatttttgtatttttagcagagatggggtttcaccatgttggccaggctggtcttgaactcctgatctcaagtgatccacccgccttggcttcccaaggtgctgggattacaggcgtgagccactgcgcctggccaaaaagctgcctttaaaaaaaatgtagacaaggtaaaaaagatattactatgttaaatgtttaagcacttgagaaaggaggtgatggataagtactgagttttatgtaccagtagcatcagtcacatactttcccttttttgtgtttgttttgtttttaatcatctgcctctatttcacatctactttctctgttggttttttagattggacaagctgtcctcgaagacagtcttagattcttaaaattaaatcttattttatttttttggagacagtgtcttgctctgttgcccaggctggagtgcagtggtgtgatctcagctcactgcaacctctgctgcctcctgggttcaagcgattcttatgcctcagcatcccatgtggctggaattacaagcatgcaccaccacgcgcagctaattttttgtatttttagtagagacagggtttcgctatgttgcccaggctaggtctccaactcctgagatcaggcagtctgcccgcctcggcctcctaaagtgctaggatgagccactgtgccaggccttaaaattaaattttatatgtaatttaagaataagaatatttaccatgtgttccatttctgtgcttttctcctgcttcttggtcagacttgtaaattttcaggaaatggtctgttttatgaataacagattagcaaacgaaaccattgtcctttattttttctatttccatcttccagatttggtgaaattagtagcttaaaaatgatacacattggagaactcagtaaagaatgaaggatgaactgctacacaaataagtcctaaacaagaaattagtgtgtaatctcattcttaaccctgtctctgtgcagtcttggaagtggatccttgcaccggtcattctttatatctgtgaaaggatcctccggttttaccgctcccagcagaaggttgtgattaccaaggtaaagaatatgcactttcctcttgctgtgataagagttatcttctaccggactacagaactaaatttttatgttgtcaccctgaaagaggaacttggaaactgggcacagtgggtggtagtcccagcactttgggaggccaaggagggcagatctgttgaggtcaggagttcgagaccagcccggccaacatggcgaaaccccatctctaataaaaaaaaaaaaattagctgagcgtggtggtgcccacctgtaattccagctacttgggaggctgaggcgggagaatcgcttgaacccgggaggcagaggttgcagtgagttgaaatagcgccactgcactccagcctgggtgacagagagaggctctgtctcaaaaaaaaaagaagaagaacttgggtttggcatacctcagttcctccagcactggacagaactgggaaagaggggcttggccgaaatcatcaggatgagtctatatcagaggttgcaaacaggcagcctgggccagagctagttcacagctatattttgtttggtgcacacaatgtttgtttataaagttgaattggttgccaacatttaaaaatctggatggaagctttcgtttgattttttaaaagctatttcttgcttctcttgaagaatcaggaaacctgataacactgtcatggttccatatcgcaaccactgtctggagctaagtagctgctgccctctttagagaggacttgtgtttgtagttcaccactgtcaccagccctccagcttcactcatttgctttatctgcctgtccctgtcgtcattagagtttgctttctttggtctatgtgcttcattcacaggttgttatgcacccatccaaagttttggaattgcagatgaacaagcgtggcttcagcatggaagtggggcagtatatctttgttaattgcccctcaatctctctcctggaatggcatccttttactttgacctctgctccagaggaagatttcttctccattcatatccgagcagcaggggactggacagaaaatctcataagggctttcgaacaacaatattcaccaattcccaggtaggtccttgagaccaggagagtcccagaccaggatgcagactggcagaaaagagaaagcaattcttcgttgaatcttaagtttggtacaatagaataggattataataaatatgcagaagtcagccatgagaacaactatatttctgggaggatgtttgaggttggaggtggaggggagtcttcagttgcccgttatcttctgtcttctgccaggattgaagtggatggtccctttggcacagccagtgaggatgttttccagtatgaagtggctgtgctggttggagcaggaattggggtcaccccctttgcttctatcttgaaatccatctggtacaaattccagtgtgcagaccacaacctcaaaacaaaaaaggtataatcccgtatatcacttttcttctggcctgagtctgacaagtctattgccttcttgggctaagctctttacaattgataagggagcaacctatccctggagttatgagaataagtgatcacttctcttggccaggacatccacttctacagatttatcataagaacagggtcttcttttcaatttggagtttaagatcaccctgaccaaagatgttggaaggctcgttcctaaggaaaattgtcagaactctgaacattcctgctgcctaaagtttgcggctctataaatgtgacttttaaggtcacctaataaggctatgttctctcttgctgatttcagatctatttctactggatctgcagggagacaggtgccttttcctggttcaacaacctgttgacttccctggaacaggagatggaggaattaggcaaagtgggttttctaaactaccgtctcttcctcaccggatgggacagcaatattgtgagtccaaataacacactaattcccctactaaacataagacgaatgtcagacaaaggatagtgcatatggattagaagttatttcttatgatttcctacctgccctcacactcacacacaagtttaaaagtggtggaaagaagaggcagctatcaggacttggtttttcttttctttctttcttcttttttttttctttttgagacagagtttcactcttgttgcacaggctggagtgcaatggtgcgatcttggctcaccacaacctctgcctcctgggtttaagcaattctcctgccttagcctcccgagtaactgggattacaggcatgcgccaccatgcccagctaattttgaatttttagtagagatgggggtctcaccatgttggtcaggctagtctcgaactcctgacctcaggtgatccacccacctcggcctcccaaagtattgggattacaggcgtgagccacgcacccagcctaggacttggtttttctaacttttattcctctgaatccaggttggtcatgcagcattaaactttgacaaggccactgacatcgtgacaggtctgaaacagaaaacctcctttgggagaccaatgtgggacaatgagttttctacaatagctacctcccaccccaagtaagtatattttcctctagtaagatgagtttacaggggccgtgcgtggtggcttactgcctgtaatctcagcactttgggaggccgaagtgggtggatcacctgaggtcaggagttcgagaccagtctggccaacttggcaaaaccccgtcactactaaaaatacaaaaattagctaggcgtggtggcacatgcctgtaatcccagctacttgggaggctgaggcaaggagaattgcttgaacctgggaggcagaggttgcaatgagctgagatagcgccattgcactccagcctgggcaacaagagagaaactctgtctcaaaagaaaaaaaaaaagatgagtgcggagttaggatttaggaaaggtattacaacatgttgaacactcttaagaaaagatctctggggcagaaatcttttgtgccattcttagattcttggtgaagaccgaggaaatttcatctggggttttagaaaaatagggtcatgatcttgaaaatgatgaaaagaggtttttttgccccagcaaactccattcaaacagtgaggcaagtggacccacttctgatctatactaccaaacaaactagagaactggagcaattcaaatgcatttttgcggggaggggactcaataatctctacttaaagtaacaaaggtattatctagtttactggccacctgagctcaatctttctggagggttttgagacatgttacagcacaaaaaatcctggtgctatgaaatcagccattccaatgggaaggagatgaagctgagattccctgaacaagtagggaggtgatgatcaattcaatgctacaaatattcttgattacctttttttttttttttttttgagatggagtttcgctcttgtcgcccaggctggagtgcagtggtgcgatctctgcttgctgcaatctccgaatcccgggttcaagcgattctcctgcctcagcctcccatgtagctgggattacaggtgcccaccaccatgcccagctaatttgttgtatttttagtagagatggtgtttcaccacgttggtcaggctaatctcgaactcctgacctcaggtgatccacctgcctcagcccccaaaagtgctgagattacaggcatgatccaccaagccccgccttggttaccttttataagctcagctctcaccattctagaagctttggaggttgaaagagaaataggatatggttcttgcccacaaggaacatacatttgaataagagatgcacacaatcacctcaaagcagaataatgcactccgtgaaagaggttcacggatgctggagggaagaaaagtctacggccacatggggtgattaggaaaggcttcaggaaggcagtggctagagcacttagtgacttggattcagatgatcctgggtcctcatgctggttctctctttttttctcgagacacagtcttgctttgtcacccaggctggagtgcaatggtgccatctcggctcactgcaacctccgcctcctgggttcaagcagttctcctgcctcagcctcccgagtagctgggattacaggcatccaccaccacatccagctaattttttgtatttttagtagagatggggtttcgccatattggccaggctggtctcgaactcctgacctcaggtgattcactcacctcagcctcccaaagtgctgggattacagcatgagccaccatgcccggcccttattctggttctgacactttctagttatgagaccttgaacttctgaactctctgatcttgattcctcatctgtaagacaagggtcatattagtgaatgcctgctctactcacttgcagggttgttatgacaattaagtgagacaatatatgaaaaaatgctttgtaaattttaaagcagcatataagcataaaagatgctaattatcatgttgaatgtaactgaagttttgagagagtatgaggttgtcaggagagagagagagagggagggagagagagagactagcgagggacagagtaccaaggaatgctgcctaggttatatgggaagggaaaaagacaaaccagggaagaaataggagtacacagagaagtggtgtcacagaacccaagggagcaaatattagagaagcgtggtcaatagtgttggaagagtagcagggtcaggaaatgttcatttagcttaagcatatttatagacagaacaaggaccagtacataaaataaaataaatacatgaaagaggggagaggactaagatggccataataaaagatggacaatagtattggcaaggaagtggagaagttgcaatcctagtacattgcttgtggaaatgtgaaatgataccacactcggggaaaactctttggcagttcctcaaagtgttaaacacagtttccagctgggcatggtggctcgcgcctgtaatcccagcactttgggaggccaaggcagatggatcacgaggtcaggagttcaagaccagcctggccaacatagtgaaaccttgtctctactaaaaatacaaaaaattaggccgggcgtggtggctcatgcctgtaatcccagcactttgggaggccgaggtgggtggatcacgaggtcaggagatcgagaccatcctggctaacacggtgaaaccctgtctttactaaacatacaaaaaaaaattagccgggtgcggtggcgggcgcctgtagtcccagctacttgggaagctgaggcaggagagtggcgtgaacccaggaggcagagcttgcagtgagccaagatcgtgccactgcgctccagcctgggcgacagcgagattccattaaaaaaaaaaaaggtgaaaagaattagctgggcatggtggcgggcacctgtaatcccagctactagggaggctgaggcaggagaatcgcttgaacccgggaggtggaggttgcagtgaccccagatcataccattgtactccagcccgggtgacagtgcaagactctgtctcaaaaaaaaaaaaaaaaaaaaaacacatagtttccatatgacccagcaatcccactccttgttatacacccaagagaaatgaaaatatatgtctacacaaaaacttgtacatgatgtacatagcagcattactcataatagccccgaagtgaaaacaagccaagcatccatcaatagatgaatggatgaagcaaatgtagtatattcacatactggaatattatttagctattaaaaaaaaaacaaagtactgaatcatgctacaacatggacaaatcttgaaaacatcatgctgaaaaacaccagacaccaaaggccatgtattgtatgattccacttatgtgaaacattcaggataggcatacccacagagacagaaagtaaagtgattgtcttgggtaggacagggtagttgggaggaaatgaggactgctaatgtggatggggtttctttgcggatgatgaaaatgttctggaattagatagtggtgatggttgcataactttgtggctgtgctaaaaagcacaaattgcacacttcaaaggggcgaattttatggtatagaaactataccataattatatttttaaaaaagagggggagagaaaggtatgagagaaggaagaagacggtgagacccagagcatagttggaaagattagctttggcaagaaagaacactacctctccactaggagaaattttgaggtagggataagctcacagtggatgggtttaatgggagctaatacatatgtacttgctatgtgccaggcatttttctaatttatttacatgttcttatttaatccttaaaacaaccctatgtggtaagtactatttttatccccattttacaggtgggaaagctgaaacagagagaggttaagaaattttcccttgtcggacattgtggctcacgcctgtaatcccagcacttagggaggctgaggcaggcggatcacttgaggtcaggagtttgagaccagcctggccaacatggtgaaaccccatctctaataaaaatacaaaatttagctgggcatgctggtgcgtgcctgtagtcccagctactcaggaggctgaggcaggaaaattgcttgaacctgggaggtggaggttgcagtgaaccgagattgtgccactgcactccagctgggggacagagcaagactccatctcaaaaaaagaaaagaaaaaagaaaaaaagaaatgtgcccaaagtcccacaggtgggataaatgtcagagctgagatttgagcccagacaacccagacagactggctgcacagtctggcacttagccactgcactgtcttatgtctgtcatctgtgttctcaaaacagggaaggctgagtgctgagagtgttaagggctgagagcatatttggggtttgtgcgcagaaaaggttaaaaaactaccatgaagaacgtgggagtaaacaaccgaatttttattcaaggttcttggaagtagtagaggcctaacagaggcagtttctccattctgtcattgctgcattctagcccttactattgttctgttcctacaggtctgtagtgggagttttcttatgtggccctcggactttggcaaagagcctgcgcaaatgctgtcaccgatattccagtctggatcctagaaaggttcaattctacttcaacaaagaaaatttttgagttataggaataaggacggtaatctgcattttgtctctttgtatcttcagtaatttacttggtctcgtcaggtttgagcagtcactttaggataagaatgtgcctctcaagccttgactccctggtattctttttttgattgcattcaacttcgttacttgagcttcagcaacttaagaacttctgaagttcttaaagttctgaagttcttaaagcccatggatcctttctcagaaaaataactgtaaatctttctggacagccatgactgtagcaaggcttgatagcagaggtttggtggttcagagttatacaactaatcccaggtgattttatcaattccagtgttaccatctcctgagttttggtttgtaatcttttgtccctcccacccccacagaagatttctaagtagggtgactttttaaataaaaatttattgaataattaatgataaaacataataataaacataaataataaacaaaattaccgagaaccccatccccatataacaccaacagtgtacatgtttactgtcacttttgatatggtcttatccagtgtgaacagcaatttattcttatttttgctcatcaaaaaataaaggattttcttcttcacttga

SEQ ID NO: 305 - DNA, 106715 bp, Homo sapiens
gcggggggcaggaggagcggctgcggccggcacagcgccagggcgagtgaggcgggtggcgcgggggaggcggcggagtaaagagaggccgccggctgggtccgcgggtcactccgaggcgcgggctgcgggcggcgggcggcgggcgcaccatgccctccttcgacgaggcgctgcagcgggtgggcgagttcgggcgcttccagaggcgcgtgtttttgctgctgtgcctgacgggcgtcaccttcgccttcctcttcgtcggcgtggtcttcctgggcacgcagcccgaccactactggtgccgcgggccaagtgccgcggcgctggccgagcgctgcggctggagcccggaggaggagtggaaccgcacggcgcccgcctcccgcggcccagagccccccgagcgccgcggccgctgccagcgctacctcctggaggcggccaacgacagcgcctccgccactagcgctctcagctgcgcggacccactcgccgccttccccaaccgctcggctccccttgtgccgtgccgcggcggctggcgctacgcccaggcccactccaccatcgtcagcgaggtaagggcgccccggccctttggaagccggcgggagaggacgatgctggctcccaggcggacaagccgcgtgtgagacgctggccgccaggggaggtcggtggagacggggaccggtcggctacctctggggacagacaggattcagcgcacccttggaagtgccgcgtcgtaaatgctgggaaaagcctttcgttatctgcctgagcccgtgagttaatgcacagatactttggtttcgggtgtgaacaaaaactttcttcgaagccgagttgtaaacgcctggcgcacgcctgctcaggagtcaaagacccagcaccgcgttccttatctttgaggtgtgcgggcgccgtcattggaaattatggttaggtgcgcgatagggaacttcagtctctggggtgagcgacgttggcagttccggattcgcttatggtctccagggtcaaaggaaagggcgaaccaacgtttgaaggcagcagcagcttttttccagttgcccaaatggttactcaaaatgcaaggggacaaaggtcgaggctttcccggggaatggttttggtaaaattgctttggggcaaagagcaacatctgggataagttgggaaaactgaagtattggataaattttagtttttttttctggtaataaattttaggaacatagcgggagggccacagccttccaacgcaaatccccaacccatttacaggcggaggctgctgccggcgggtgggcgggggcgatccccacattttgggcagtcagtgcatttggaagttaggggagcttccttcacccttgccctcagtaatctgtttctgcatccttgctgaaatggaagattgcctctctgtgaggtccagatatagagcagagtcactttgtaataatcggaactcagaaacggcctcaattgagcatgggttgcagagatgagcagttttactgagctttgtctacaatcacagcttaagttaattttaaaaaaagattgaatgtgatcaggtacattaggaaaaaaggtttgtcttttttttgtgataaactttaaaaaatcacctacttgaagagtggggaaaacactggatgaggaggtaggagcgccctttctgccgctgttgctgttggtctggtgagcttatctcgctgcagttgggagtgtcggtggttgcaattgtacatgttttatacgccatgtgctggtgtgttcgcacagtggatggctctatgctatgtgctccagggataaaacccatggcaggacagccaggcgatgtgtgtatgtgtttgggatctttctgtaacgccgtgtgctgctgtgttcgcacagtggatggctctatgctaagtgctccagggataaaaccccctggcaggacagccaggcaatgtgtatgtgtgttcagggtgtttctataatgccacatgcaagtgtgttcgcacactgagtggctctatgctgagtgatctcaggataaacccccctggcaagacagccaggcaatacatatgtgtgttgggatctttaatttctacttaatccatggtaaggctggggactgctttataattggtgatggtctggttagagatttcacagttgaaaggacagggcatggacttggatgagagagggcattatctctgtgagtcgcatctgttaggtggcttcttccactccactcagcagcgctgcctaatgcttacttcccaagtgaaccagaggacccacatggagggcagacagctgatttttggagacatttaaagatgaagaataaaacgagcctcaacaagtgctcaagcgaggtttgcatgagtgagtatgatccatggacatcaaagaagacagacataaaaatctgtaatttaatgctctgacggatactttggaagcattctggagttgcagggttactagcatcccggggttacaataaggtgattttatgaagatcagtggctactaaaatgcagtgtggaatgatggagggtcaggggctggctcggtctccagctggctgtgtggcttgggtgagttactcgccttctctgggcttgtatttttcctctgtaaaattagccattggattcagcccgttacaatgctccaaatgccatcagggtcaccacctggttactgtttggtgtgcccagaacaatgattaaaaagtctttaagaaagtagaatgatattaggaatgtaccccgtaaagccccaaaaaagtttttgaaatatattggagagattcttttttgttttgttttgttttgttttctttgagacggagtctctctctgtcgcccaggctggtgtgcagtggcgtgatctcggcttactgcaagctccgcctcccaggttcctgccattctcctgcctcagcctcccgaatagctgggactacaggcgactgccaccatgcccggctaattttttgtatttttagtagaggcggggtttcactgtgttagccaggatggtctcgatctcctgacctcgtgatccgcccgccttggcttcccaaagtgctgggattacaggtgtgagccaccgcgcccagcctctttttaaattccaaatagttttgtgcttcttttggtttgtttttcatgtttggtttcttaagaggaaaacccccatctattcataaagttcaactatccaaaacaagtcagcaactctctgaattctgcatagctaatattttgctgtctttggttcaactaatttttttctttcaaattctgtctgatgaaaggaactgtagttccatcttcagctaacattatgtatccagtgtatttttataaacttgaagcctaagatacaaatcatgcaaaggggtgaattgggagagtttacaaagtgggcgggatgaccagactccagaatgcctccatatagctataatacttcatccttgcaccatggtgggaggggtatcattgtcctggcttcatagaagagagacctgaggaccttccagggtcccacgccatttatgtagccaaactggattcaaatccgggggccttgattgtaagtcagtccactttcctccataaagtgctcaaaatccttcaagcaagtccatgaaacatagtactcagatctctcacactttataacctgcagaaacctcgttgaaactttgtatttattttcttactatcatggtcctccaatgggctactttgtttcattttacggtgtcaggatccacagtcagccagactggcagatggggaggctgtgctttcatttggtgggaatggttctctagcctcctgatgtgaaagttgcaaaatggtcatttaaatctcatacaccaccttcgcatcttacaacttgagatagttctaagacactaagtcagaaatcaatgccaagggcacatccctttatggccagctcctaatttgtgtctcctgctcaaggcaaggcagtggatttatcacccacattgaacttcctcagtggagacttttctaatgtccgaatctcggccttatcttgttgtcagatattgggcagaataaaatacaatgtaacgcagagaagcgagtctgaccccctgtcccaaatatttcaattcactgcccagggagtgtcttcaagattgatgctaggatttttcaatgcttgctaatatggtatggatgaaaaaaaaagagcttttccctaggctatcactcagagcagggcttcagaacacctttaaaaatagactgaatcacatttgtttttcctttccagatcattttgacttggaatcactttttcccttccagattacctggctgaatctataaaaactgaatccattgtttgtttttattagaagagtgtgtctttcccatactttctgaaacatcaacaattcaacaaaaattttatgttggcccttgtccctcagagtaactagtcctttctgttgatgacaaaagtgttttaatagtgtaataggtttttgttttgttttgttttttgacaaagtctcgctatgtcacccaggctggagagcagtggtgcaatctcagctcactgcaaccttgccccccgggttcaagcaattctcctccctcagcctcctgagtagctgggattacaggcacccgccaccgcgcctggctaatttttgtatttttagtagagacagggtttcagcatattggccaggctgacctcaggcgatctgcttgcctaggcctccgaaagtgctgggattacaggcatgagccactgcacccagcctaatagtttatttttaatggagtgaaagcaggactctaatgagtgaacagccaccccactaggtgtctgattcttggtctaggcagcagaatggccaaacagattcatgcagcaatgctttctggacctcagaacaaggaaaatatttacaataaggaccttcattatgagaatgtgcaagagtatctcctgctcctctctggcagctgatattttggattatcaacatcagttcagctgaagtttatttagcatttattttattctaggcactgggctaggctggggatacaaagatacacgagtctttctcaaaacagcgtgaagcttggcagggaaaattgcagcgataatgtgatgacagtggctgtgggtgtgataaagggtaccaccctctgatgggacagaggagtgaaccagggcagaaagtacattgaccttaacctcaacctctgagtacaaggaggagtccaagaggaaaatatgagggaaaagatgttctattctcacaccctctcatcttcattattttctctgcacccatttattttgtgccctcaggagcagtggttggtgtgcattctcgggtcgcacacacagggtttggaatcaaaagacgagggttggagttcaggaattttcctttttcacaaacatctagggcccttttcagatggtccatggaccacacagagagacaagctgggtgtttcttaatgaggagcatgatgagaatataatgactgggagagaattgccagttccaccaagcacaccctggagactctcagaggggaacattatccctttatcctcagacaggtatcccaaatcttatcagatgaaatgctgctgtttattttcagagagctttgagctctccagggatgggcaactgataataaaatcctggaattaactggggagcgggggaagcccacagctgaaccacactttctgggagtcttggtaaaccttagaaaggagctttgggcaaaggtaggggactccaacagatgttgcagagacatctgtacttttggacccacgggttatttttggcattgacatcttagtagagtggaaagaatacacatgtcctttggtgtcagataaatcttgtcctaaatcccagctcctctattaacttgaagggcaagtcaactgagcatctgcctgagcctcagtttcctcagcactagaatgggtacaagaatgcctgccttagcaattggcttgacatatgcttgcaaagtgcctggtcataggtggtgctcagaacagttggttcctgtgaacacataaagacccttaagccaggtgggagtcaggagggagggaaggaacaggctatgggccagatttgaccctggagctgtaagtttgctgatccctggtctagcataataaatcactgataaatttgccttaaatataaagagtcaaagccttggccagttgtggtggttcatgcctgtaatcccaggagtctgaggccagcctaggcagcattttgagactccaactatacaaaaatattttaaaatttttaaaaaattggccgagtgtggtgatgcatgcctgtagtcctatctactcagaaggttgaacccaggaggtcgaactgtgctgctgtattccagcctgggtgacagaggaagaccctgtctctaaaaaataaaataaaatatctcggacactaatttgctctaaaggctgagaataccgatactttcccactggaccccacaggtaggtcatatttcccagcttcccttgaagctagagaggccacgtgtctgagtcctggtcagtgatgttggggaagtgaatgtggaactgctaagcctggagccggagcaaccttcctcctgcagtccccggaggatggtggaactcttacacggaaggatatgcgttcctggaggcatgcgaggcaggcaggagccccacagctcccctccacaccaattcatctgcacaggaatatgggattgcgaataagaaataagctttattgtgttacacaactgaggcttgggagactgcttgttgcagctcttcctgttaggctgctctgactcatacagcatcttagtgtgcttcctggcagggcacaggtcacgaggctgtgggcacctgacaaaatggtatggaggctggtgcctctaagagcatcctcccctaggtctggtacacaaggtctctgtgcctccaccccatgtctccgcctatagaggcttttccctctcttagcccccggggctcccactctccaggcagtcaccctgggacatgtgccacagctgtcctccccttgggctcttgtgtgcgctgtttcctttcctttcctcaaaatacctgtctttcctcggccgggcacggtggctcacacctgtaatcccagcactttgggaggccaaggtgggcagatcacgaggtcaggagatcgagaccatcctggctaacacggtgaaaccccgtctctactaaaaaaaaaaaaaatacaaaaacgattagccaggcatggtggcggctgcctgtagtcccagctaccggggaggttgaggcaggagaatggcgtgaacccgggaggcggagcttgcagtaagctgagatcgcaccactgcactccagcctgggcgacagttagagactctgtctcaaaacaacaacaacaacaacaacaacaaaaaacttgtcttttctcatgaggctgttccgttttgtacctttacacacaccaattccagacacaccttccccactgctgcctctacccagggctgggcttggcttcctttatctgtctagctgccttccctctactcatcttgtgctcactgcctcatcagactctgaggtgctggagggccggcgctctgccctcctagcctaacgcagtgtttggcaaatatttgtgattaaattaatgaatgaaagagaaagggattccttggcacgtgtaatgctttttatgaccatggctaggccaaccctggaattggctttcagagattaacccaggccctctaccgatggtgttgcttcctgttgactcctaacgccgattccttgcctcatcctccgccttcatcatcttctgccttgcatccatgaggtgtgatcagtcacagggtgaacaatcatcggcggccatggccgcccgcagacctctggagcaggaggaaaacaggcctccactttacttgactcctatctgctcatggggtctgtgtccgcagaatcctaatgtagggggtgtgacctggaacatgaaagggacaggaaggaatagaactgctggctctttggggccataattttaatgtgctgacgtccattgtgcagaagagacttttcccagctgtcctggcaccacacagtagtctgtgtcatcaatcgagcctgctccagggcagctgggcacaggtgcaaggcccggtgcagggaggagcactgaagggcctgggctgagcagctcccagggtgcagcgctgtccccttcatggctatggagtggggagcaaacaccacctaccttccaaaacaaactaaaacctttccaacattctgcctcggttttttccccaccccctcttaaatcataaccaagaaaggacatgtatttatattctgtgaggaaaaagcaaagttttaatggtctttggtgtggctttttaaaatgataaatgactgttgagcttgtcaaatcatggctaatactgttttatctgggtgagatcagtaacagctttttaagggttaccatgctgttatttctcttcgtgttggtaataaagcaaaataactctgtggctggtacttgtgtgataatagagaaaattagtgaggggtgaagtttaggggcttagaagaaggtgaataaataaatgtaatttaaacaattctggggcaggcatccatcccaccttccttaacatctgctctagattctagtgccctgtagagtccaaggaggggagctgtccttgactgtgagcatagtggaaaccactggatggaggaagggtaggcacaagcctggacctgagaaacaaaggcacctattctgctttcaaattcagtcctgggagagcaggtgacctctgtcataggactgctatagggcaccagcagtggagataaccaagtgataagcaagtctttggctttccattaacagagaccactggtcccaacatggaaaagcgtcccagaagcctttcccagttgctgcgtccacctagcatacacacaggatggctctgatttcatgacacttctgccaacgggaagctttgggcaatcgacagcacaaaatgaaagacaacatgtgtgcttccaggctagtggggagggacgccgtaagctgatgcttctgagacagaaaccgaagggacaaggtgccaggagctcctatactaaaaactgtttgtagcacatttatggggattaagtggttgtggtgaaaacagcctgcacgtttaatattgatgacgttttaaaaagcaatgcactgcaaatatctgttgagaaatgaatgccctttaattgttcacaaatgagtatcttaaagaaaatacccatagagaagtcacctggatagttaaaaacattaactacccagggtagaggagaaaattagattgaaactaattcagattaatttggcatcaactttaaagaaatcaaataaataaatgtccaagttattagagtgtaagaaagtgttccaggaaccttttccacagaggttcttgatcttcctgtgtggcagttagtgggaaattatgtgacaaatttatcacatctcttgtcagctcctagcatccttgtaagattgctacaattccctatccagtctgtatctaatagagcatacataatgatttttattttaattccaaccaagttgaatacattataaaaccaaataaaattgtctatttatcaactccagagatcattagataataacaatttattgttgcagagttttgtgaaaaaattatcaaattttagatccaaactggtttagtgtagtgtattgctaaggcaaataggtggctaagaacgtagacttcctagttttgtggatgcaagcaaatggctgaatttgagggtttttgagctctggactagcccagtcctgagatttcctggttttagtggggagacttaggtaaataaggcattcaaagtgcttgtcctgttgtctgagatatgtaagtagctggtgatgatcatagatgctgacaacagatactgagaaagttgactcagagaggcagcttgggcctggaaattcaggcaaatggcaagcccctagggctgagggaagcgtgctttaggcagggcaccaagattccaatactaaggacgtggccagggtccactctctggagctggtataaactggagcttagtaatgaaaactagggaaaggcccagggtagaggtcggagctaccagatttggcaagatttctcaagcccccgtggattcagttgtgatatagagtgaacaatccccccatccgggtggctctggggacaaatgagaaacatgcaggaaccgctgagcatgtggaaggtcctgggcacatgccagttccctccttcttgctctttgtcactaactgtggtgcccaagtcctccccttgcctggtctagtctggggttgctggatgtggactcactcagaaccccacacttctttccaattgcagtctgagcagagggacgctgggacagagccctggactttcctaaaaccgggaaatcccaggacaggactagaccagagctcagtgagggctgaagactcagctgtggggctgcagggcttgaactccatcgcatgttttctcatgagcctggaaatccttcaataaatatgaacaacaaaagtgccccaaaggtgctgtgttagaaaggcacccatctggctcatgcctgtattctagttgagtcaataaggcaaatttaccttatgttgtttgtgggcagttgcaatggtcctataggcaatgaaaacatcagatcacagtttgcttgtgttgctgtgagaatctgacctcaaagaaaatactcccccaacccaaatccaaatctatgaaatgaagacacagcagttgtggtggggcactaattatgaatgttgagcttcaggttagggttgaagtaaatttgggctaaagtgctttatatattgagcattccaattctcataacattgaatagacactaaaacttaatttacgaaagtagtttaatagccaatggggacaaaaatttattcttacagttatcaatactcacttcctgcttagaaacttgttttcttccttaattaccagaaaacagagtacatttaataatcaatcatactaaatttaaaattagggaaagagagcttatggtgttcagcaaaaagggaaatatcaaaaaagacatcttagcatctggattttttggccaaaaggagagcctgcagtttaattaatggtctacatcaaacaggatattttatgaagcaatagaaagctgtaattaaatctagccttctggatttgatacatcacaaaaccaggagataaaaacaacagaaaattggtgatagggttgaaactcaaccttgttcaagaagcattcacaatggaagctgttgacctatattctatatactttacatttcaacagatagtctatgtttgaacagtgatttttttatatgtgaagattttctgtaaagaactgtattaacatttgtaaacagagtccaagaaaaattaattatgactccttttttggatttcacattggtacagcatgacctttaactcattatcttattacaactattagaagaatagtaaaaacatatttcatatacttttcaaatatttataatcatagtattctttttataatagttttcaattcttatttgatagcatgctatacaattatttttccttactaaactttcatagacatttcacttaaatgatttttctttttttaaaccatataacctgtcaaagtataaaagacacatacaagcggccgggcacagtggctcatgcctgtaatcacagcacttcgggaggccaaggtgggtggatcacctgaggtcaggagttcgagaccagcctggataacatggtgaaaccccgtctctactaaatatacaaaaattagccagccgtgatggcaggctcctgtaatcccagctacctgggaggctgaggcaggaaaatcacttgaacccaggaggtggaggttgcagtgagccaaaatcacgccattgcacttcagcctgggcaacaagagcaagactctgtcttaaaaaaaggatatatacaaggtacaaattatttgaattagtctatattgatctcccttttcattctctcagtttctctttattaaacctctttctcttaagaacataaacaaacaacaactactagaaaagctttaaagtccagcattagtcaaattgaagtactgtcctgacccggaaagcattatccaagaaagtgcatttcaaggccacctttcctaaaccagtctcaggaaggtccacgctctatttccctttgcaaaagcatttaagttaatgctgatatatgatttgtatttattaactcccccccgccccaaccaatgtagtcttttttaccttaacctattattgacttggtgacaagatatagagtgatcatggagctgggatccatgttcctatgtgtcatcagttagaagaatgaagaggccaagggagtcattctaatatttatatggaagaataaaggcccagaagcaggtaaatcattctaaaagaaggggtagggagtaagaggagggcttcctctaccagaaattaaagtgaaattccaagccaaagtaatcagaacagcatggtattggaacaagaacagacaagtggaccagtgaaaagatcagagcacttggagactgactccacccaggggaacatcatatacaataaggatggcctcataactccatggggagaggatggattgttggctaactgatgttgagaaaagtaatgactcatcagatatggagaatgatcaatctgcctatcaccatgtacaaaggtggactcagggtgaattgaagacttaaatgtcaaagtaaaaggtaatattaacaaaggaacatacagagaaacatgacaaggtcagggaaagactttttaaagaaaagtataagccaaaaatggattatctagattatatcagatttctgcctcatgacagataccatcagcagagttaattaagtgatgacaatgatactgagtagagccatgctactctaatcaagggtcgttatgggagttatacaatgcatattgtacaatgcatattgaagccaaaggcttcaataatgttcactgtgtgctcaacactgttgtagacacttgacatgtgttcaactcacttaatccctacccacttcatgaggcatgtgccatttttgtagattttttttagaggaggaaaggaaggtacagagagattagataatttgtccagaatctggagctgcaggataggagacttggaaaagaaattgcaatgtctgaaccaacaagtaattaactgacatctctagaacaggaaaagaagttctgtaaatcaacaagtaaaagatagcaagtcttgcagaggaatcagcaaaggatacagatagttttcatgagaagaaacttctccaaaaggcgactaagcacatgaagaaatgtgtgtgtctggggagctttccccttctaatactaggtcagtttctgtgtggtaacttgagaatacaatgaaacatcgtttaaagtaacctgtggcatgttactggtaccttgcaggctaaatacatcctaagtgtgctaatactgcagataccttgatccccttaggacagttgacccaagccttcccaggagctgtttacctgggggtgtcacctggctgcaaaacagggatgaacaatgcacagatttcaggggtcacccagggatgctgcgacctcagaacacgtcacatggaagatgcctctcagtttccatctgaaaagcctggtattaatccaataattcaatcaccaaatttagtagttgcattccccagattttcttttgggcaatccacagtttgtagaatgcttttctgtgttcccaggttcagaatttcagggattgcttctgtcttcaaggagcacttcagcttcctggttaggaagagaaggtagcagacgtgtagaaaaccctctgcgagactctgctctggcagttttatgggtaggcgcaggcctgcctgaaaccaaacgctttcctttttccttcaccctttcccgttgttgtctttttggttcctttggtatggtagtgtctccatgtgagtttccagggaagcagaggctgaagcgagggcgtgggagctgtttcatgcattagactctctggggagcagccacagggaggggactgagggacaccgcgggatgtccagagaggccggtccccagcgggtgggggcgggccagacggtgcggagggggagaggaggaagactgtgtccagggcatgagccttctggcattgtgggttcccccacgctccagcgccggaggggacccaggcggcaccagcgcgttaggctgcccccgggagcagtgctgcaggagccccgagctcgaggtggtgccggcagccgcgcgctcagagctccaacagggctgggccgcggccaaggagccaggagggtgcacgagaacgtcccatccagggacccacggatacttcgttcctgccagggtctcctttgggccgacagagttgtctctaattgagtgcaggcagccccggagcccgccgagagctgaggctgggctgggctcccggggactcgggcagctatttcaggcagacgcggggcatcgcgccccaatgcgcacagtgttgccgaggggcagaaagagagggtctcagcctaagccaggtggaaggtccgagaagaggctggaagggggcgatggtccagcaggagctgggatgaacaagggctggaagagcaggtgggagttccaggtgagggaagtgacctggaagcggagcagaggtcgcagctggcccctgctgggcctagtctcgcttctgtcgtgaccccttgtctaggaagatcccatcgcgaaggcctcatgagtcccacgtgaccggcacgcctgtgaggcaggaagctcagagtccaggccccgtgcccctctttgggggctagagcttctcccaggtgcaggcagcctgttcacaagagcggggccctcctgggtgaggcctcaggctccggttgtcacccctggcaggcgtgtgcccagcttagatccacctgcagctggctctgaacgctggatggggctgggttggggttttcctgtggcctggggtgagtcccagcaagccaccaccatccttgcccactccccacaggacagagcatagaccctgttcctaatcctcccaggccacactccgcagaatgctgcttctctgtttccaagcgcctgcatgtcttgcatcccctgccaccatcttttgtccgcctgaaggggcagccccataaaccttacttagacatgtccctgcccccagcacaggggctgccttcaagaccgcctttgtctgtggggtttttccttgatgactgttcagcatgccggccccactttcttctgcttgcatctggggttctcccaggctgaccagctgtccccacttgctgggagtgaaggggtttcctgggatacgaactttcagtattaaaaccaggagagtcccagacaaactgggacaattggtcaccctaactgacccacaagtagaaaaatgattcataaaatgtataataatgaaaagctgtgaattatttgcatgtataatagagggagaacatggttaaataaatgtggtgtagccatttgaaatagctactacagggatgaggaaacaatacctataaaataacacagaaatgttgatgacatattaaggaagaagaagtctgggttatacatttgtgcaaactgtatgatttcaaccatatttgtacactccatgtggtagatgggttgttggaaggtaaagactggctgcataggggccctaaaggtgagagcttttcaatactgctgcttacgctttcttcttaactaattcagatattattttgccaaatgcagagccaggaggtgtgaagcagccttcatggtggcaccacatgtgacacagatgagtagatgggtgcagcgttgacaataactgcagtcatattgttcatcttgatgggatttctgagtaacaagtcaaagatgcagaaattaaagtatacaaattggattgggttttcagtaaaggaaaaggcaccaaatcgtttctcagtaaggcacagtaaagggaggctatcaaaacctattgttagtaaaagtacctattgatgatctcttaagcaaaattgttacctagttgtccacgtgaaggaaaggactctctgaaaagagggggctgtttagagaagaatcaagcctctggcaccagaggggactccccagttaggaaactgttgtaacaaaaggactccatcgctcagagcaggatcagatgataaatcaggctgaaatggtataagaaacctacaattaccttcctccatatgaataattgaaaaggcaatggcttcatttaggttgtaatctgacttacagcttttaatagctatgctctgttaaagtgtacacattatcttttaccttattgagtttatattgctttatatcaatataatgatttttttactatgtaaaaaaatacacttacatagtaagtatatttacatagtaaaatcaataattttttttactgtgtagcaaaatacacttacttgattcatgaaccattaagtttttaaaatctgtgtgagataatgtattctctgggtttattttgactactgaaaatttctagtcacaagacattatagctagatacattccaggtgtttttaaatgttaaactgtcttcagcatcagaaatggcctcatgaggtaagtcattattttcccctattttcaaggatggaattgaggctgggagcagttttgtgactcacccaagttaagatgtcatgaaaaattgtttccttgcaaggtctgccacaccctaaaccaatgtcctgtcccaatccacctgacttgagggctgttagattttagatgtcagaatcacatggagggcttgtggaaccagactgctgggcctcactggagtttctgatccaatgggtctggggtagggcctgaaaatttgcatttctaacacttgcagttcccagatgttgccgttgtcacaggtcttgggaccacactttgaggatcactggtctagaaggaggcttgtattagctagtgatttttttcattgtgatgatgatggctaaccttacacttgaacaaaaaatgtggctttctttaaagaaaatcatcagaagttcagttctttaaaattcagctactactcactgacatggtgtattaccctgttctcatgctgctaataaagacatacctgagactgggtaatttataaaggaaagaggtttaattgactcacagtacagaatgtttggggaggcctcaggaagcttacgatcacggtggaaggggaggtaaacacttccttcttcacatggaggcagcaaggagaagtgctgaacaaaagggggaaaagtctcttagacaaccacgagattccatgagagctccctcactatcatgagaacagcagcatggggtaaccacccctgtgacacaattacctcccaccaggttcccccatgacacatggggattatgagaactacaattcaagataggatttgggtgggaacacagccaaaccatatcattccactcctgtcccctcccaaatctcatgtcctcccatctcaaaacacaatcatgccttcccaacagtcccccaaattcttaacttattccagcattaactaaaaagtccaagtccaaagtctcatctcagacaaggcaagtcccttcaacctatgggcctgtaaaaccaaaagtaatttagttacttcctagatacaatggggatacaggcattgggtaaatacagccattccaaatgggaaaaattggccaaaataaaggtgctacaagccacatccaggttacactgatgcaagagatgggctcccacagccttggacggctctgcccttgtggctgtgcaggatacagccccgtcccagctgccttcatggctggcattgagtgtgtggcttttctaggcacacggtgcaagctgtcagtgaatctaccattctgggttctggaggacagtggccctcttatcacagctccaccaggaagtaccctagtagggactctgtctgagggctctgaccccacatttcccttccacactgccctagcagaggttcttcatgagggctgtgccccacaatacacatctgcctggacatccatgtgtttccatacatcctttgaaatctagatggaggttctcgaacctcaattcttgtcctctgccaacccccgggaccaacaccacatgaaagctgccaatgcttagggctgagacctcctcagcctggattccattgtccactatcagcattttggtcaaagtaattcaacaagtctctaggaacttccaaactttcccacatcttcctgtcttttgagccctccaagtctctaggaagttccaaacttttccacattttcctgtcttcttctgagccctccaagctgtttcaatctctgcttgttacctagttccaaagttgcttccacatttttgggtatccttgtagcagcaccccattctctggagtaccaatttactatattagtccattcttatgctgctaataaagatataaccaatactgggtaatatataaaggaaacaggtttaattgactcatggttctgcagggctagggaggcctcaggaaacttacaatcatggtagaaggggaagtaaacatgtccttcatcacatggtggcagcaagaagtgctgagcagaagggggaaaagctccttagaaaaccatcagatctcgtgataactcattcactattatgagaagagcagcatggaggtaactgcccccatgattcaattaccttccgccaagttcatggggattatgggaactagaattcaagatgagatttgggtggacacagcaaaaccatatcacgtggtttcttttactgaagcattttcccctccactgcaacttgcatacctgtattgcaactttcaagtgctataaaaatagcacatacccccatcaggcattgatagcacctccatgtgcagattttgaaggtaactgaaacttcctctgccctgacaggccatgctgctgctcagtgtcttccgctgctgtctccaagtggtgttcttgtcatcctggaagccctgccttgggccatgcctgaaatgcactaatatgctcatttgtgaggtagtacagagtggtcagggcatccaggcacatcatggatgatggggcactgttacgggtgctgggacactgccatgaacaagaggcccaggtccctcccctgtacctctgtagtcggtgccagcctcatgccattcagctaccttcacccataatgtccctgcaccctctctgttgagtctacctcctcttcctcctccatccagcctaggtctctggcccagttcttcagcccatatcttccagtggccccactgcccttcccactggcctgcctgggctgagagcactgctggagacaccactcccagtacatgctgctctgtcctctctagttcccggtgtcctgatattgcctgatagtcatgttgagtgtcctgacgtccactctggctctccagactctgttctctgccaacttccaacctgcccctccccactcataccctctccccctactcttagcaaaccactcactctccacttccctgagaaaatagaaaacttggaataatacgcttcttcgatgtcctgcaccaggacaatcaacttctctatctctgctcccatagcttccttctaaccccacagcagaagagttataatactgccccctgttgaaagcttattttccacctgtgctctggtccccacccctcctggcttctcaggtgatttccacctgcctaccacacccttgatgcctgtcttcagtctctccttcactggtgttctttgcttgtccacccttaaacctgcttaagttcacctgtccacgcttaaacctgcttaagttcacctgctatttaaagcagtgtcccttatccctgtgttcctctgcagctgagcacctgtaattccctgtcataggcacattcatcatctctacattctcaccttccactcactcctcaacctagtgtggtctccatcatccccgccacaccacagaatctgtgcttcccagggtctctgatgaccttgaggttgctgttcactcacctcctcacccctggtcttatgtatcacaccaaagtgtcagctgtgcaaaagccaggaataggattcctactctgtagggacccctgtggctggcgcaggtagctgccatagtcaccggttcatatttcaccgttctgctcatttcgtgctccctggtacatctcttatttcactgcttgcatattctgtccaagctctgataaagccaaacacatttaacagatggacacaactggccatgcttcaggcttctgattcacccatacttccaggagccatgaatctgaaatctggagctggtctgtagaaagcattctatttagtgaaatgttgaaggaattttaggtcaactatcatgtatttcattgtctccaatgccataatttccaagtgcctacttgaacagtagatactttcaggggattttcatatcaatgattgcattttgccattgttctttattttttcagtaatgctccatctgtaaacaacccaaatttcaaagcctgacatagtgtattgacaaattattcctggatgcctgtttttatcaggccaaaatccatagttattctaaaatggatatcatacaaataatgctgctgtagcatgctaacattttccagactattatgaaaatgtttagctcatttacaagtcatgggaaacaatatcggaatttgctactgtgtagaaccattactatagcacttccagtgatgcctgcttgtgatctttattgcccactttatagttctgtattttcatctccattttttaatccttaaatatacaaagtaaaatgtaaatatcttttttgtgggtcttttagaattattttttagcattagcacttgtaaatttactggaagtttcaacaatttgtatttcatgttagataaaagtaaggaagctttcaaagaaaagtctaacaaatataacacatgtacccacctccccaaatgaaaaaatgttagcattttgttgtattttatttagatttttttgcagagaaataagccattatacatcaagttgaaattctacttactattgttgtgcgacaaattatctcaaaacgtagtgatttaaaacaaccatttttttttactcacagattatgagagtcatgaatgccgaacaggcacaagaaggagtgtttctttctgctccacaaagtgcagcttcagataggaaggcttagaggttgggatgacccaatggccagggcaggagccgtcagggtgtcttaatttactgatttggcagagagtagtgctgtcagttgggccctcagttagctgcaacaactgcacatgatacctctgtgtagcttgggcttcctcctagcatggtggctgcagacgtcttacaaagtggttcagagccccacaggtgtgttctataatagctcacaaggcagaagctgcattgcctttcaggacctagcctcagaagtcacactgcctcatttctgctgtattctgtcagttccaggagagtcacaagcccttcctggattcaagggaaagggaattagatgccatttcctgatgaaggtggggcaaagttttgaaagagcatgtgtgggggactcatgccatctttggatagtcccagtctccctcctcaaggacatcaactcttgtagtttgtctccagtccaaacatgtgtgggcactttccctgcatatgtgggtatccacgtgaatgtctcttcattgcttctccatctttctaaaaagtaatcacagagagtcatgaaatccagtgttagaaccaggcattgttaatgctcttatgttattattattcaagctgggctaggggaatgtggcattaataaaacaatatgtacattggatttagttatactatactctctattctaatactttgtaatcattagtaataaatagtagcatattacttcatgtaggattttgcaaagcttaaactattttcacatttgttccttcagtccaggcttcctaaaaataaaatataataagagtcttgagacttaagttcatattttgcatgaatcagataaaataatagatagtaaaatgctttgtaaactgtgcagagctattaagttgccccttatcattaagtttttaagtctgattttctgatattgtaatcctgtcctaggcttcctctcatttctttgctgtaatctttgcttctacctcatttcttgtgtccaaatacaatcagttattcaaggcctggctcaaatgctgcctagaagcctttcctgacacagacctcccagcttacctcctctccctcctctgtgcttttatcgcattctgtgtttctctggtagattatcttttgtattctatttcacgtatcacatcactggggctcacctggaagcttctagcaaaccaaaccccagtctctgtagcccttagtgcacaacaacatgcctcccacccaggagcaggctgtgaaagtctttttattttttaattattatactttaagttctgggatatgtgtgcagaacatgcaggtctgttacataggtatacatgtgccatggtggtttgctgcacccatcaacctgtcacttacattaggtatttctcctaatgctatccctcccctagtaccctaccccctgacaggccctggtgtgtgatgttcccctccctatgtccatgtgttctcattgttcagctcccacttatgagtgagaacatgaggtgtttggttttctgttcccatgttagtttgctgagaatgatggcttccagcttcatccatgtccctgcaaaggacatgaactcatccttttttatggctgcatagtattccatggtgtatatgtgccacattttctttatccagtctatcattgatggacatttgggttggttcccaagtctttgccattgtgaatagtgccacaataaacatacatgtgcagcgtgtttctagtagagtgatttataatcctttgggtatgtacccagtagtgagattgctgggtcaagtggtatttctggttttagatccttgaggaatggctacactgtcttccacaatggtggaagacaatcccaccaacagtgtaaatgcgttcctatttctccacatcctctccagcatctgttgtttcctgcctttttaatgattgccattctaactggcttgatatggtatctcattgtggttttgatttgcatttctctaatgaccagtgatgacaagcttttttttcatgtgtttgttggccggataaatgtcttcttttgagaagtgtctgttcatatcctttgcccactttttgatggggttgtgtttttcttgtaaatttgtttaagtttgtttacaagtgggatgacagtgtaaagtctcccactattattgtgtgggagtctgaatctctttgtaggtctcgaagaacttgctttatgaatctgggtactcttgtattgtgtacatatatatttaggatagttagctctttttgttgcattgatcttttactattatgtaatgcccttctttgtcttttttgatctttgttggtttaaagtctgttatatgaaactctgggatgaaaattattgtcattcagaatgtcgaatactggcccccactctcttctggattgtagggtttctacagagagatccactgttggtctgatggacttccctttgtgggtaacctgacctttctctctggctgccctttacattttttccttcatttcaaccttggtgaatctgacgattatgtatcttggggttgctcttctcaaggagtttctttgtggtgttctgaatttcctgaatttgaatgttggcctgttgtcctgggttggggaagttctcctggataatatcctgaagagtgttttccaacttggatccattctacccatcactttcaggtacaccaatcaaacgtaggtttggccttttcatatagtctcatatttcttggaggctttgtttgttccttttcatgcttttttttgctgatcttgtcttcatgatttatttcattaagttgatattcaatctctgatatcttttcttctggttgattgattcggctattgatacttgtgtatgcttcacaaagttctcatgctgtgttttttagctccatcaggtcatttatgttcttctctaaactggttattctagttagcaattcatataaccttttttcaaggttcttagcttccttgcattgggttagaacatgctcctttagctcagaggagtttgttattactcaccttctgaagcctacttctgtcaattcatcaaagtaattctaattctccatctagttttgttcccttgctggcaaggacttgtgatcccttggcgagaagcagtgtcctggcttttggaatttttagcatttttgccctggtttttcctcatcttcgtggatttatctacctttgatctttgatactggtgaccttcagatggcgtttctgtgtagatgtcctttttgttgatgttgatgctattcctttatgtttgttagttttccttctaacagtcaggcccctctgctgcaagtctgctggagtttgttggaggtccactttagaccttgtttgcctgggtatcaccagtggaggctgcagaacagcaaagatttctacctgtttcttcctctggaagctttgtctcagaggggcactcaccagatgtgagccagagctcttttgtatgaggtgtttgtcaacccttgctgggaggtgtctcccagtcaggaggcatggtggttagggaatcacttgaggaggcagtctgtcccttagcagaacttgagtgctgtgctgggagatctgctgctatgttcagagctggcaggcaggaacgtttaagtctactgaagctgtgcccacagctgccccttcctccaggtgctctgtcccagggagatgggagttttatctataagcccctgactggggcttctgcctttctttcagagaggccctgcccagagaggaggaatctagagaggcagtctggctacagtggctttaccaagctttggtgagctctgtccagttcaaacttcccagaggctttgtttacacggtgagggggaaaaccacctactcaagcctcagtaatgatggacacccctcccccaccaagctcgagtgtcccaggtcgatttcagactgctgtgccggcagcaagattttcaagccagtggatcttagcttgctgggctccataggggtgggattcactgagttaaaccacttggctccctggcttcagccccctttccaggggagagaacagttctgttttgctggaatttgaagcaccactggggtatgaaaaaaactcctgcagctagctcagtgtctgcccaaatggctgcccagttttgtgcttgaaacccagggtcctggtggtataggcacccgagggaatctcctgatctgcacgttgtgaagaccatgggaaaagtgtagtatctgggccagaatgcatggttcctcacaggatggtttctcaaggcttctcttggctaggggagggagttcctcaaccccttgcacttcctgggtgaggcaatgtcccaccctgcttcagctcaccctctgtgggctgcacccactgtctaactagtcccagtgagatgagctggtgcctcagttggaaatgcagaaatcacccaccttctgcatccacctcgccgggagctgcagaccagagctgttcctattcagccatcttgccacctgtgaaagtcttttgaatggatgaatgaataaatgaatgaatgaactgttttttcactggcttcatatgctcatgcctcactaaggttgtagaaaatacaggatcttgaatactttaaagtggcaatgtcttgtgagacagacatcatccctgctgtcccaaaattacccagcgtgtgtggagaggcccctggctttggagatggggggcatttcccttgactcccacctcctcagcaccacagggctcatctctggggacctggctttccagttagagcagacctggatcaagaagggccacaggaaagagaaaagaaagacttggcagtgggagggcagggcgttcaggcctctccagggaagggtgccaacctctggacttagcatgatgtttttaaaagaaatgaatgtgtgtcttgtctctaccttcaacttgtaaggcaagtgcagtgccagaggctggggtatctctgctgcccaggtgcactccacagagacagagcaagagcacgtgcagactgtgctgtccaactcgcatagaaggctgacaaccacttccgtcctaatggggaaagtgaagttggcaaggcagaaatgaccacatgctcacccaaaaccttggtagcagcatgtctttccagaaattttgcaagccagatctggaaatttgatggctttgctcctctttttcctgaaagaaatggaaggaatcaggctcatgaaaagccagatttcacctccatgcacacaaccaggacccttgccttcctgaaatgccccacaggctttcacagaatagatgcagtcttagcagtgggcagcttgcttgttgtctggcctaagtctgagccaagataaagacatataaactgccaaggagacactctattccagaaccttctcttctttgcaaagcaaacataattttaagatcaagatgcataactcttgtaatcaaaagcttacacatttcctagcccccccaccaccctccacccccaagcaatgggttctaagcaatataaactgccaaagtggtgtgtagagggaaataaaaaccagactggtaagataccaacttttttataccagtttcagaaagtgcttatgcagagcaagtgtgggacaatattcaattggcaaaaatatgatgaaagtagctcacttaagaaaggaataaagtcttgtttattgaaagaacagtgacaagtttttttaaattctgaaagtcttgcatatttcctgcactgtatatttacctaagtacaagtgttttaagaatgatctcttgagcctgcttaaatcaagaacgcatatttcagcaatttgaaaaaaattgcatttctttgttcatggctgttctcggggttgagaggtatggacccaggagtcagaggtctgagtttaggcttccacctgctaactagcttggaacctctgactaggtttttaaaccctctaagtcttgggtttctcacctgtagaatgaggataataatcatgtctacctcacagtattgttgggaggacttaatgagatgtagagaaactaatctaaagcctggctcacagaaaggtaatgtgaagtctcaaaaaaagtgaattttacaatagcaaagacatggaaccaacccaaatgcccatcagtgataaagaaaatgtggtacatatataccatagaatactatgcagccataaaaaggaacgagatcatgtcctttgcagggatatggatgaagctagaggccatcatcctcagcaaactaacacaggaacagaaaaccaaacaccacatgttctcactcataagtgggagttgaacaatgagaacacatggactcaggcaggggaacaacacacaccggggcctggttggcgtgggggcaggggggtggtgcggagaggggtgaggggagggcgaacaccaggacaaagagctaatgctcgtgggtcttaaaatatagatcatgggttgataggtgcagctaaccaccatggcacacgtatacctatgtaacaaacctgcacatgtatcccagaacttaaactaaactaaaatttttttttaagtgaattttagccactagattttagagttgaagcatgccatggtacttgtgattaggcatctacctgtgtatttattcacctgaacacctggatgtgtagaataaaaattgctcaattgttgaaggctgctgcatcgctctatgctacttgttctgttaaagtatgttcagggagccagcccagagaggcacctccttttagctctgtgaggccttaaagctgggtcaccatgaagtccctgtatatatattttttgttttaataactccaagtaaccaaatgaaaacaattatttataaaatgtattaagaagtaaatgttatcaatttgggactttgcacaactattattaatgtgacctcaggtcccatgacaaattagaatggcaatcctgggtgagaagttaattttgtcctgaagctggcagaatcaacatgcaccccagttgtgggataggcctgttctctcactccatcacatccaacacctggcaaggacagcttttggtatgctaaagaatttgggaaagatgctgttggtgtaggggcggggagactagaaacaagatctttccatgggcagagctcttcagagcttgataacaaagtttggtctgcagcctttgtcaaataattataaactctccagttgaaacagggaaatgtgggctggcgtggtggctcacacctgtaattccagcactctgggaggctgaggcaggtggatcacttgaggtcaggagttcgagaccagcctggccaatatagtgaaaccccatctctactaaaaatacgaaaattagctgggtgtggtgatatgcacctatagtcccagctactcaggaggctgaggcaggagaattgcttgaacccagaaggtggaggttgcagtgggctgagatcatgccaacacactccagctgatagagtgagactctatttcaaaaaaaaaaaaagaaagaaaaacagggaaacgtttgcaaagcttccatctccaggttgacttcagtcaataatcctattgtcttaaggctggagtggacttccttgaagctctttgcccagaaaaccttgccaaaactctcctaagattattaagagttttctcgagtctcttttcctgattccaatcaactggaaatgttatgaaaataattctgtggtcaagtctcacttactcttgctctcaaacacaatccaccaaaagaacaaaacacaaagtaaaagtggatgcaagacacaagaggaagaggggccctctgcagaggctgctaagcaaacgtaggtttggctcaaagatttttgtttctttgaatcagttcactatttttaacctgtggaaatttgttcactcattctaacagtagcttttgctttgtgaaattggtttatttagtgttatgttcctcctgtaaaccttttcattgtatgtttttctcctaatctaatggtaatcctctcagtgatatgagtaacctggtgtttgtatttaacactccttcaacattcacagaatcagaaaatatcagaacaagaaagccccagccttcaagattgtttgatttgtgttccctaattttatgtgtgaacaaaactgaggctgtgaagattctagaataatatgttgagctcaaaaatatggtagtagaattagaatatagctttctaatatttgtataaaagtcaatgatatttagaagtttaaaaaagatacacattaaactgggaaaatactaaatatttaaattctgtaggctagttttcatattctggaaaggtggattttcatatggcactggtgctggtgtttcatcaggtcagctgtctatgtcataagagggtgttcttattagaaaatgtaggctttggcaagctttaaaaggtacacgtgttactgcatgttctgacgagattttgaaaatctttggcaactgtgctttccaagtggagaaaaagggctaccataatgttgaaagacggaaattaaaatctaatcagatatggtggcccttatcctccaccttagaatttcttttcgtggaatgtctggtggacagtaatatatagaggctcctcgacttaggatgggatcacatccagatacacccattgttaaattgaaaatatcataagttgaaaaatgcatttaatatacctaatctaccagacatcatagcttagcccagcctactttaaattgctcagaatgcttacactagcctgcagtcgggcaaaattatctaacacaaagcctattttgtaataaagggttaaatagctcatgtaatttattggatatagtatcagttgtttccccttgtgatcgcatcactgactgggagttgtggctcactgccacttcccagcatatatgactagcctggaaaaagatcaaaattaaaaaacaaagtacatttctactaagtgcatatcactttcacaccattattaagtcgaaaatcgccaagttgaaccatcctaagttggggaccgtctgtagatcaggcaatccttgacattttatggcggcagattgccaaaagagattggagtctagaagtcctggaagcagccccaacaattacacagaactcagcatcatgccctcacatcaaggcaaggagggagagttgtccctatttttcctttccttgaaagggatagtgaaactcattctgaggtttttaaaaaatgtactttttaatgcttttcctctatctgttttgctctcccttgataccctgtctacatcatgatggctgtggcactgctcctgctccttacatggggtcttagaatgcacaaagctgcccaatatcactttctctgtatttgaggaaaatttctagtagcaaaagaatatcctctgacactcttttcaaaatgccaactaaatgtgatagaactactttttgcaacagtgaagtcccaaagtctctttcttcctgatgggttaatttagtaccttcctttttccaaatcaaagaaccataaaagtcagtgaaaatctgcattattattatcctgtgtgtttagttttgctttttagtacttaccattattaaacacttggcccatttttggctaattgttgtgtaattccaaatacaaaccagtcaccatggattattgcagttagagtcatcagaaagcaaggagctatgactcatgctctgttcttgccatgtttttctgatttgtatttcatttcttacctgtgctcacaagtcacatgaagatcaatacatctgaaatatatatgctgactatgtcaccagattttatttctcccatcattgaatctggacaggcttctttcaaaagtgttgagtcatttttatgtctttatcacactcttctaaagtccttaaaactcctaattatttcagaggattattgtcatataaggtatacaaaatcaattatatgaagaagttgtaatcactataattaaactgaggcttatctagacagatcctgtgtcatatttttcacataatgaggctaaaaactttgtggagaaaataatggatatttatagaatatactcaagtgtatttattttagaaggtctgttagacatttcacaaaagaatctgtaatctacagaaattaccaaattatgttacataatattttaaaaacttgttttagaataagttggaatgtgaggtttataaaacaactggaataataaactgaaattataatttaatttttatacccagtgcatttatttttcttcctatgacttgactatagtttaaaattcttataggtttagtatcccttttttgaaaacaggttttcaatgtgtttctgtaacaataatgaaaagtaaaggcatgtaatctcttttccaaaataaaagattggtttgagaattatgatcatatatacaatgtactaaatgcaaccttttatgatgatgatataaaagattcacagactcacaaatcatatgccactcaactaaaatactaagagaacataactttatctttataaaacatatacataggcataaatacatagacaaaggtctagaaaaatatgcatatcagtgtggaaatgcaagtgatgataatgatttctgttgttttcttctaatttctatagagtcactatgctatttaaattttcaaaaaattaagttatgtgcaataatctttttaaaattatttgttttttaatcagctttttaatctgatgacatagaatgataacgtagtaaatcatagtttctgaaccaaaaaacagggacacatagactgagaagtgccaagttcattttagagattaaaaatacaacggcattgggacttttctagaaaattcaagatatgtggtcacaattgaggtgttcagcttctagagcgaactgaaccagatatctgctaaggctctgatagagaacagctggaagctcagaaaggtaaacataattcaaatattggtgaatatgccagtgcagccgagaaggtgacaggatttgaaaaatgtgccaggacacaatgagaaaggccttggaataaatacaaaaagcccaaactttattctgtaaaagtggggagctactgaaggttttaatcaaagcagggataatctcatttccaaggcaaaaaaacaaaaagaggcattccttcctaataccacatgtaggagctgttcttattctatggtggattattactttagtagtatcttataaagacagtgcctgaaggtcttttatctgtacattgatgtaacacttttcaaaagcatatcagcagacacatttttggaagcatgcattctgaaacttgaacttcaaataggagttatggctgatatcatggagtaaggtaaaacagaagctgactcctctccagtattcaaggctgactgttgtctctggaactgagaatactgggaaaagtgtgagttggacactgtgcacaactctaattaacactgttctaaagggaaagtatatgaatatattgtttaaacactaatagttaaaagttatactacaatatcttcaaggtttaacacataaattgagacacacacttaattaggcctaagaaagaagtggaatgtaaactcgttgattttattttcataaatgatttattttacaactatgaagaggaataatagaggccttttattagcaaagagattattatgatgtctattttcagccatgatttttctaccaatggaaagtggaactgaaaacctacttagggtgatgtgttggggttgggatcaaagagactactataactgtcctacctctgagattccagcatcacatgtggtgacaataacacttcatttagttatatttctagtgagtccagtggaatggagaaaattttttaagttaaaaattctaaaggacatatgtataatggtaggaattatttagtcttcttaataaaataaatcatttattttagaattattttgtagtctgaaagcacatttcctataatttttaaatgtgaaagcaggcaatattatcttgtaggtattgtattatattacaagagccaaagcatgctgattcccaatttcatccagtatgacttgtcttagaaaaagaaataaaaatgcagatccatttattcacttattaactgagtacatttcctgaatccatgtgcacgttgggtgataggaagctgaggccctgctggctaaagatgtaagagaacagagcctaaaactggcacaccagctggaaattaggagggcaagtttccctagaaatgggagaaccacagataggatgaaccccaaaatctgaatataaactctttccaaatacttggctgaccaccaacttatgcaaacataagggagacttcagtaggccagcctgaaacaaagcaactgcagaagctgaaaaatttagggatttgtcagttgctgcatatcacaggagagcagagcttgtagtttgagtccaggtcagctaacttcttaccagaacaataagccaatgatcaccaggagagcacaatagaactcagaaaggctgcagtgactattatctactagctttaggccctgtcctctgatatatcaagctagtaagacatgcaaggaaaccaggaatgtgataatgcctggggctgggagattatggaaattgtcagtcacccaaaactgactctaaataggcctccatgttgaatttagtagtcaaagacttcaaagcacctattgtagatatgctcaaccaaagggcattaaaagaattaaaggaaaaattgtcttaatgaatgagtagatagggaatctcaacagagaaattacattattaaaaaaatggaaattccagagctgaacaagtacaataattgaaataacaaacttgctaaacagtctcaatagcatattggagatggcagaagcaagaataagtgaaattgacaatagatttttaaaaatggcccaatcttaagaatagaaagaaaaaaatacccacaaaaaacactatcaaggagtccagcacacaaaatccaagctctgcctgtgcattaggcttcaggacatgagggaatggcagtgaattagggctgcactatgccaggaacactcatttaccacaactggatttgtcagcagttcgagtgaactttccttaggcattatagaattaactgtacttagagagaggttcttggttaacctcagtgttttcacattttaaattatttcctaagtttcaagtgaaactaaatatcatttgaaagacttttaaaggcagtctgcccaccccactccaactcaccccaatttccactaacaactacttcaaatgtaattgtcagaaagagcaccccactccactgcaccccaaatcagcctccgatagatattgcatctgaccctggggggcccttcccgctttcctcttgctatgctcactacactttatttccctcaatgaaaactccttccccaccctcctaatgtgtgacttcacattctatacatagaatttctttttttttccaaagtgaatatagttttatatattttttaactacataaaaataaaacacaatcaatacaaaaagaaatggataaaacgcaaatgtgaaaacaaactcaccaatcaccaaccactcagaactttaggtcagtttaataggtgtcctcttctgacatttcagtgtccagtctgccctccttatccatggggtctgcatccacagatttatccaaccatggatagaatatatgttttaaaaagcaaaaaaaaatatataaataaaaaccaatacagtataacaactatttacatagctatgttgtattaggtattgtaaataatctagaaataatttaaagtgtatggaaggatattcataggttatatgcaaatactacatcagttttggtgggggggatggagtctcactctgtcacccaggctggagtgcagtggtgccatctcagcttactacaacatctgcctcctgtgttcaagcaattctcctgcctcagcctcctgaatagctgggattacaggcgcacaccaccaggaccagctaattcttgtatttttagtagagacggggttttcccatgttggctaggctgatctcaaactcctgaccctgtgtgatctgcccacctcggcctcccaaagtgagccaccacgcctggctcaaatactatatcattttatatcagggacttaaacatctgtggattttggtatccaaggagggtcctagaatgaatcaccagattatggtcatctcctgaggatgattgtatatacataaattcggggtgttttacaccaatggaatcatatgcccagttttataatctgattttaatttttactcagaatgtggatatcagtccaaatcaataaatatagacaataattgacttagttcagcagagaaactggaatctcacactaagggtgaggaaggcgggagacaggagcattcagggaggggcaactcacaccttagagaccaggaaagactcaggtgtttctaagccaggggagccagtggggctgaacacaagagaatcgtgcaagctttaagaggagcatccagatccccagatctccggttcctccaggcagccccaggggtctgggaggctgggtgggaaggagatctaagtgctccctccatgacctgctgctcgactcccaccttccttccaccctcagaatttctctgtgggcctcattgtgactccgctcccctccttcccacccaggggaagccatctccacatgatggactttatctgtgtgcctcatcatgtctccactcacctctttcccatgcagggaaagcaggctccgcacagtgggctttctctgggctcctcttcttgtctcacagtctcctcctctgtggcttatgctctcaggttcctggtgcatttatcaaaccagcgctccgggtcctgctcactctcctctggctgccagtgggcagctccctgcctcccagtgttcttaagttcagcagttataattttcatctccaatgattcctttttgcaggatgctcctttttcatgattaattgctctcattttgtcaatgcagcagactcttgtgtctcactgaaagcatgaattcaggtttttagttacttcttgtttcttgtgtactgttgtgcatggaatcattttctccagttctgctcttctgaagaattgtgctgagccctgctgccctgcctggccagcatcttctcttcatatctgtagatggacagagttgttcggtgtagcaggtgccctgcgttctgtcatgggagacacagtgccttgttcaattctttcacttcccagttactgtattttttctggttggtggggctcagggggagatatccaagggttcaggagctctggccacttttccttgtgagagtttgatggggctgaacaagacagttagggaaggaggtaagccctcccttcaggtgctcagcccctctgacctctgtactgtctgccccgtggcctccagtccctcaacacacacctgcacccaggaccaagcttcctcggccctactgtgcgcagctggacccatgggctcctgcacaactggaccccagaatcctccctgcagccttcctctgccttccagccgacgcaggagctgttagtgaaggggaacagaaaaatggatccataaatccttgcttacctccctcgcaggctctcttgcctgggacagatgacatggctcctgcctgctctgctctctgtcaaaacttccccaagtattgagtctgtgggcatgaccattctctagtttctatctgtggcttggaatttgtgttaatgtattggttgggtcctttcaattggaatggggagagagaggaatccataaatctgtgactcagtgacctttaggaattggaagccaaggtctatttcttatgtcttattttgttattgtgcatagcagtgtctctcaactgtttgaatccaggcccctggagatgaatgtggactgtcagtggtgtggctttttccacctgcaccttctgcagagcagggtgcaccttgagcaccttgagcacgggcaccttctgcctgtgcacctgtgcacatgaaggagcctcttggggtcttgctgcctttggggcttttgctttcgcctccagctccttatacttctgcccatatatctcactctctgttttccagcctgtcttttctgttttctgaagtctgccctttccccttcatggttaggtgaaggaaggggaaatagaaggaaatatttgaagaggaaaggttgtggcactgcagggtatttgtgactttgtccccaattgcattcttcaagtgcagttcttggtttttagggtatctctttgagtgagattatctttaagtcttttgtccttattctgagaaaatcttataaagtttccctatatcttttcatagcctggatttctcagaaaacacatggagaagcaaagcttctgctaggttgctgtgggaaggggaagtataggcccaggcgggcagagtgagggaaggggagtggggcagagtgggcaggaaagtggacacatgtgggtccccacagagccctccagatcccatgcatagagcagctgctgccaccagcagcacagacatcttccaagggctggcagagccagggcacctgctctccaagaagggcagaggtcggcaggcatgcacagcacttaccccaaggcatggtgtcattattgctgttgctttggagcctcttatgggactggaatctgtggagaggatggagagagtaatgcatctggaatggacctcctggctccttcctatttctcatcttgatggtcacactgcacacttcccaggccgcttggccacctcactgtcatgcagccaccaggacagccagatccctgctccaagcactgcaggaggagtcctcctccagcagggtacaacctggcactgcagctgctgtgactcatgcgcatggcatcaaggcagccatgcccaggcccagctcttacctctggggaagatagacagctgacaggtcaggacacagactttggtggcaactgcccgagcacccacatagcaagttgccgaggccaggggcatgcagagccaggaaaacctgggaagatgcataaacaggcccagcccaactttgctttctgtaggtttcaggttggcagaggaaagcaaataagtgaagaaagagtggtgggggaggagcattggacagagggaaggaggccaaagacaaactcttctcactgcctgtaagtgagcaggagtctgacccccggcttttctcccagagcctgcttctggctttacagttatcactgccacactcatgagcagtatttccaatactgcacagcaagaggggctcccaaggaaatacatgtagacccaatctcagcttaggcaaaaagatttctttgctacaggatttgtcagaaccttaaaatgtcaatgtattggaatgtctgcattcagaagggctatccgagacattatactaatgtatgatggtctccactcatgtttttggaggcctcatgggagtagtgtttataggcgtcaccttaggaaatgctgccctagacttttctgactgtttgccagccccatcaggctttggatctcgtatcttcagaaatgctgtcagtattttccaaggtaaaaactagtaaagaaaaccaaacaaaaatccagaaatgtgctcagttaatagttctcctagtatcttcccagaatagcatgtgcatttcacccttgtcctggagataatgtctattacctggattataatctggaaatgaattctaactccttttattatgggcatgaccttgtttctgtactcccagcctccaaccagcaagaaaatgggggtctcagtcccacagccacaaggactgggattctgtaaatgccccagatgagctgggaggcagattcctccccagagcctgcagatggagttcagcctgcccctgacaccttgcgtgggagacactaacagggagaagagctgagcctcccccagccttctgacctacagcaccatgtgatcatgaatatgtgttattctaagccactaagttggtggtaatttgttatatagcaatagaaaacagatgcattaagtttgtctacaatgcccatgcctgcagtcatattctttggcttcctagaaggtgaccagcaatacatgtcagagtgtacaattagaaaaaaaaatacaaacaatacattatgttgtggttctcaaacgtgagtgtgcatcagaatcccctggagaagtgtattcaaacacagatttctgggacccacccctagaaattttgactcagtgtgcccgaggtggatcccaagaatttgcatttctggtaagttcccagatgatgctgttgctgctagaccaggaaccacactttgagaacactgtgttaagtcatgagctctccttttgaaaataatgatttactaagttgctgtatgtttctcaatctctactttaattgcttattttatgataaaaaatatttctataaaatgctcatagaaatgcctcttattgtgagtccagtccccattaagttgcctgtctacattgtgcttctgaatttagtcatttttccctttgggactgttctatacaccaccttattcactatttttattttcttacaaataaactttacaggaatcagcttaagaagctaacagcaattatctgcaacaagaataagtatgatgaaaatagagatgttacctgattgtggttctttattagagagtaaaggaacagagaaagaattaccccaaagctgcattgtgcatcagctgctaagtcatggcctgcttgggcaggtacgagaccagtgttaggaaatgcaataatccagacaactggagctgcagggcactggctgtcagttacccccaaaccaaggagagaagccaaggggaagactcccctcttgggctcccaaagaggtgaatgtattagatagtcactggctagagcatccaatttagtcatctttccagaacactcacggtcagatgacatgatgatgaaatatctcgtatagaaggctgatcatctcacttgattaaaaagttgtgtgacctgatttttccatagaattggcccttaatcatgagccatttttttgtcttgtatttaatatcagtcttgtgccagttccttggaatatccaactgactgatccaatcaatgaacgagtgtttatggagagtctaccaagtgccaagcaggagaacatcaattctgtcagccagtccttggaataatccaacgtggccatgtgggaggccacggcaaaggatggccaagcaccttaactgacagggttctgttcttgttcacagtggggagggtaattctccaaaattcagtcctgccactgccactggagcaagtaaggggtgtcaggcaactgtcactgtgccctgatgtgcagcgtggcatgtccacttgactctgtgacacgtctctcctcctagcccactggtagagcaggtcagagattggtcccttcttgaccatttgtactcccagtgttgatgatactacacccagatggtcagagcgaggctgcaatttcagctcttaactcatgccccggcttagcactcttctctcttagtggaagggaaaccctggtagtgccaggtttatggctgcagggctgagagcaacaaaacccatccaggcagcaggacctgctggttgggctgacagccttggagactgtgttgaacctggtcagcactggctccagcagggatggggcagagtctgtatagtgaagtctaacgtggttggccttgggtgggattctgtgtgggtctcatccttttggatggaattgcattaaatcaatgcagtgactcaagatgtttagttcatgaaaaacagtagctatgcttgccaagtatttgtgcctttgattaacttacttagaactaattaatcaccacttataatgtatacttttttaaacagactcctccaaaatggggaggcatgaatttaaaatagagtagccctattcagatggctatgatccacttgttaagcactccttagcctgagtggcctaaaaatcggagcctggggcaaaagcttatatattaattcttgatcaagggctgccatcctagggaaggaagaggggggaaagcaagagcggcaggaaggagggagagcaattcagagcgaggaaccccaagccagccacaactccacagccaaggcactggcctcattccccagggagctctgcaaagtctagtggaatatctgtgtctcagaacagccatggagggggttgggctccctcttctcctgtgctccatcttttactggtcagagtctgtcctgagagacagtcccatcatggctaggttgtcgggtcctctctgcttgggaagccagtatcttgcgggtccaggctgacacctgagaggtgggaaaaagatgtacactctctccagggggctgcaactggggaatgagatgagtgagccaccagggagatgcagctgtgtggaccaggactcagcacaaagctcatccctgaattccaaggagtgagaatgcagaagagagagctatcttccttgttgttttattaatctttgttttatgtgaaactgataggagtattcatttcctagggctgatgaaacaatataccagaaactgggtggtttcagaaaatagaaattgattcgctcctggttctggaggccagaagtccaaagtcaagatgtgcacagaaccatgctgtctcttgggctctaggagagggtctgttccatgcccctctcctggctccagcactgctgccagtccttggcactctttggctggtagatgcatcaccccaatctctgtctctggcttcatatggccttttttctggtatgtggctgtgtctctgttttctcttcttcaaaggatacctgtcattggactagggcccgctctgatacagcatgatttcatcttaactcattacatctacaaagaccctatttccaaaggtcaacttctgaggtttcaggtagacataaaatgtagggtgttgagggaggggggaagccagtcctataaaatacgctgaaattaactatcttccagcaggtaaatagttgataacctctatatcaactgcatattagactaaatcctatttaattggactggagttgggctcaggcattttttcatttacctcaagtaattctatatatatatattttattatcatcagcattatatcactgattataatgcaattggtaacatttattggacagttactgtgtctcaggcactgggctgagtactttatgtatattataccaatgactcatcattccagttcttcatcttacagataggaacacaagagtcaacaatgttggaaaatcgccagaggacacagacctgggagcggccaagtcaagacatccaggctgtctggctccagaactaggactcgtctttgccaagagaacccagaacatatttagaacctttcatcttcttctcgtctttagacagtctcagttatttagagaaattgtaaacattttaagatgcgtaactgcaagccttcactacaaagaaataaaacagcctggagagagaggggctgacgtatcatatgtatcttgtacaacctgaggatgagtcaccaagggcagaagttaataaatgacaggaattattattcaaacagatttaatactttcatgtctcccaatttcacaagtttagaaaaaaagtgatgcatttagaagacatctctccctcctatttcgaagcttagctgcctaacctacagtaaagcctgatagttatgaaccttggagaacagcttctatgacaagtgaggatctaagagcctatatctcataatgatgcctctctgcattaaactaaatcaccccattctgggcaatcattgcagatcccctggtttcctgtcttggccctggacccacactcccttccccatcaaaggtgggatggggagaagcagctgcccagcttaaaacagtgtacttcccagtcatgtgccaggcagaaccttgttggcacccacgtttctgtctctgtggctggacctgctcctcatcttgtcttcagtgcccttctttttcctttgatttctacctaaatccagctcattgtgggaccttctctggtccaaccttcttcaagtctccagctgctcttacctccatgggccatttctttgtttgaaattatcttacatttagtcgattccattctgtttagatctcagctgctctacatttgcttcacagaaattgaccttggctcccaaactatataacaagtacctcccagggacagaaacaaggtgtgtatatgcctggtattcctcccagccttctcggcataatgccaagcaaacaaaattggagtgatctccaacatacctgataattactctttatacctgtagtataagaagtgttaactttttgacattaaatgaaggtgcccaaatagtgccatcagatcatgttaaaattttttcatggtgacccaaattaataatgacatcctttttcctcatggaaacccaaaccaaattattatttatgattactataatttttagccattattaggctctgttatggtactgtgtggttgattaaaaatggaagttgcccatggaggtctacatgtcattgttttggccagtgcaaaatgtagccaggagcacaccacacctgacagtatcagtgattattattattattattattatttttaatactgatgaagagtttagtgactcctgatttcaagctaagagctgattaggaaaggttccattgacaactcatccctagaaaattaaaacagaagcacatagatattgcaatttgacttcagagacttccctttctcctagaacaatgcacaccgcaaatgagggctatttccgatggcttataactaaagtaaaatactgtgatatcgtctaatcttagaatctcttaagtgagaatttgttcaagagggctaacctagaacccagtggaaaaatccagctgatggtcacctgggtccattccctatggtctgaggagcaaatgaggcccctctcctgagtttatttatttatttatttattttatttatttatttattattattatactttaagttttagggtacatgtgcacaacgtgcaggtttgttacatatgtatacatgtgccatgttggtgtgctgcacccattaactcgtcatttagcattaggtatatctcctaatgctatccctcccccctccccctaccacacaacagtccccagtgtgtgatgttccccttcctgtgtccatgtgttctcattgttcaattcccacctatgagtgagaacatgcggtgtttggtattttgtccttgtgatagtttgctgagaatgatggtttccagcttcatccatgtccctacaaagaacatgaactcatcattttttatggctgcatagtattccatggtgtatatatgccacattttctatgccttttgaatacttgcattattttctgccttgcttcttacctttgacctttgtaaatgggagattatttgttgctcttgttttaaggataatttagaaatgacaactttagcatatatctaataattacttgccccagcatttcatcattacaactcaaattaacataatgtctgtttggattttaacaaagaagaaaagctaagaaaaaccttcacttggaaacccttcaaaagtttctcatttggctacagttactcaggctttctgcaaaacgaagcaatgttatccttacattacaccaacagttgtttgagtcttttatcagactgactttctgctcatgccaaaaggcgtcattttctttgtgtaaaagtgactttgaagattaataagtaacagaatgggtacacatggatttatgaacatttaaaattgcttaatgtttttgcatgtgtatactttgaaaaaaaataggagatgccccagttgttctacatagattgccttaggagaaggacataaatgtgcgtcattgattcagacttaagtgaattgttggtgatccacaatgatctcccattgacaagaggtgggtttttggtctcccaaggaactacaacaagcttttagtactttatatcagaaaaaagtacttagcctgtgaagctcatggctttggtgcccgctaatctctctttaaacacgaaagatacatcgcaggcccagagctgttgcatcagcaggcaggcagcaagctgagagctgattaggaagcgtcagcccctagaggcagaggtctgccccctgactctatgagcaagagtcaacatcaagcccttcaatccttgggcctgcagttttccctgtacaggaaacacaagcgtgtgtggatgtgtgtgcatttctttagaaacacataatttgtttgttgctttattttctacctttgaaagatggcaagatcccagtcacaaaaacagaaaccaggctaggtattttaaccagagagggatttaataaaagcgttaggatttgagctgttttggaagagctgaagaagaaggagaggacaggggtcaggaaggacagttcctgcagtgtcctgccctgctgggtggccattacaaagctggcagctgtggggcagtatccctttgcccccatgtggccaggcacacggggcactggctgactcccacagccaccactgtcaggattggagctggagctgctgccacagccagaagcagaatgtccactacctccctcctaccttctgattttgcactagctccctactggtacaacctacacagaaccctgccagtaaaggaatctgagaaatgtagtcccctgaggtacagaaaacacagaagggcaggcagtatctggcccagatgcctatcataaagctttagaaaatgttgtgttatcgctgcactttaaccattgaagtatttattttaaattgattcttatttaaatatcaaatataagagaaatcctatttgactatgccttttatgggacagtcaagaagataatcagtattatattaaagaatattttatgggtttaaagaatattttgggggcattttaattcacatagttcaaaagcagctgaatacatgtattaaaaggcaagctcttgataggccttgctatgtcatctacgaaaagcactcctgtttgcctctgctagctaactcagctatttgaagtacagatggatgaagcaaattctactgtttgggtttttatatttgacactggttgatacttttccaaagcaaatgttgcatttccgctggtagtttgatttcgctgtttgctttctgaaattctatgtacttttattttagtacatagaataactatgcctgcttaattccaatgagaaattatttcagataaataatcatcaacttgtttacttaaaataaaatttttgtacctcgaaaaaccaaaattgataataaaaatcctttaaaatgaccatgattacaactattatgcatatctgtaaatctctttacttcttacatcttgactgatcatctcagcaactctgtgagaagccaactactactgcctccaaattttttccaactatgttaggtgacaggtcattagctgtaaaaccaaggcaagaagttggactttataagtaaatacgatagtttacttatgaatatgtatttatgagactcctcaaaattcatattccaaccacattaattttctcttcatgctagagtctaatgcagtggttagactgcagcatgaaactggggtaagcataccacttggagatttgcaaagatgatcacaggaattgtcggcctggataattttaagggagccagttttcagatcctcaacctacattcgtactctttcccaaaacaaattcgtctaagaatatgtcccttttaaggatgcaggttcctacccaaaattgtacttttcccactttgcaaaattaatcatgcctctctctcatctttctctgaggcattgacttgaagttttaaaatcttcagggcaacaaacaatgggacaatttgacatattgttccagtattaagaaagtaactttcttaatgtaagactaattataagtaaatgtaaatgactgatgacttaattaaacaactttttgtaagtctgatggtttccatttttttccttagagcagaactgtaggagaacttacatgacatgctggctaataaaaaagtaaaaataatttggtgatagatcactgtgaatcttggcatacagctgagaaggaggttaaagaattgagtaacatttctgtagcaaaactcccttcattcccactgatttatttatatggaaaaatcttcttggcccataaatttataaaaatgaaaaacagaaatagaattaattttgagccctaactcattctagtaataaataatatatccactgatttcatgacctaactagaaaaacttagactcgcttttggccatggagacatacatttccaacaaaattttacttctgcataataattatttcttaaaatttattacatcttatttttttatcaattatgatctaaagataattgtaattataacccaagcagaaaaaatccaatatttagagacttattgccacaggaaaattttaaaaattaaatgtcaatttatatatgtaacttattgtacatagaagtatggtgacaaaacctataaaatattttctacacgaaatacattacattagaataaaagtctgtggaaatgaaaataagagctcaaagagaaaaaaattgatgtcaaatttcagactattaaagaacagtctgtttatagcaattggacacctgatagcatataatattcatactctattgcagccatcccttcctttttggcactagggaccagttttgtggaagacaattattccatggatggagggagtgggggctgttcggggagatggtttcaggtgaaactattctacctgagatcatcaggcattagttagattctcataagaagtgcgcaaccgagatttcatgcgccgcccacaatagggttcacgctcctatgagaatctaatgccgctgctgagctgacaggaggcagagctcaggcagtaatgctcgtggcccactactgctcacctccttctgtgcggtctggttcctaacaggccacaaactggtactggtccatgactcggtggttggggactcttgctctattcaatacgcttaaaagaatgatgttggccaggcgcggtggctcactcctataatcccagcactttgggagtttgaggtgggcagattacgaggtcaagagatcgagaccattctggccaacatggtgaaaccccatctctactaaaaatacaaaaattagatgggcgtggtggcgcacacctgtagtcccagctactcaggaggctgaggcaggagaatcgcttgaacccgagaggcagaggttgcagtaagcagagattgctccactacacttcagtctggtgacagagcgagactccatctcaaaaaaaaaaaaaaaaagaacgatgttataacaacatagtatactgaaaattacatcctttgcagttatttaaacaaaggatatttatgtgttaatgtaaacatacgtatgtgatacattttcaaaatttatttaaagagtatatgagcaaaaatctttacagatcattgatctatacaaaagataaggtgttttgaagatctgcattctggcatgtctccatgtgtgttttctttgttttctcagtttgaccttgtctgtgtcaatgcgtggatgctggacctcacccaagccatcctgaacctcggcttcctgactggagcattcaccttaggctatgcagcagacaggtaggtaccaatgtgacagccattttatgtcactataataccatgcattaatacggggagaaaaatgttttatgttaactattaaaacaatatttttgctaaattcgcaaacaattcttgattccatcattcatgacatccacacttggttggtttgactaattcttttcttttcaaacttcatctccttattccttgaacttcacaaaggtctgaggctgttcccggtaggactgagagcatcagaatgaaaacacagacctccaaagcaggaacatcatgactgggttgatgcactgttatgctgaatactacagaatcaatcaattcgatgtgcttcagtaacaacttactgattgtggttttattaatttagtcataagattagcctattccaaatttgtttcacctaatttttttttaaacgaaatccttgtattttattctacaaatgtaaaactctgtgaaaaaaatatttttccaaaaaccactaaaggagtttttttctattattttgtattcataaatgcaactgcccagtggcaggcatggtgagtgtgtatattcaagacatcatgctttctatttaaatattcttcttccttaagattattgatgctagctattgtattcatgtttaactctatttttaattccaattctaactatgaaaatacttgcagtaatttaatattcctctctatcccccttagcaggagtaataggaatatagactggaaattgctgactcatggctgtatctggcctaatattgttctggttaatccatctctgactcatggccatatctggcctaatattgttctggttaatcgagcccagcccatggtgggttcttgtgactgtaccattcagtgggtgatactaagtttacctttagagaactgcaaacagcaattaattagctaatagaacaacaaaaggccccatatcctgtagccaattgaagatctgagtttaatcagaccagtgcttcaaaatgggtagagccttgggtttcattttctgtcactttttctttctctttcatgtttctctctcgccctctccacagctgtcctttgcatgtgagtttctgctggatcctttcatgtgtgatgccctttcccctttttcttctttttatcgatgtccttttctcctgttctacttctagccctttcaagcttcatctttcctttcctaatttcccccacatgccactctttttttgctggctacaatttggaactgtgcagtttaaatatttatttattttgttttgtttttactctttctaatttggatattaggttttgcttcatctgtgttttttttctcttactcagtcaataaccatatctccaaactaaattaacgttactaaagtggggaatttccccttcctatattctcataagtgattgagcatctgtcctcatataggacttgctgccttggaggggaggggccagacctgggaaaaagaggagccatgaataactctgcttcctacatttggcttcttctcttcctccatatccatgatttatatatgtgaaggaagaacaagaaataacttaataggccatttgtcaatgagagtacagtgtaggaagggtggaaagtgaatataaaatctagattggggcttctggtttcctgttcagcctataaggagcttagaatttgccactcagtcttgacaacaagtaaaatgctgaacaaactgaaaaatcaataattcttctcagatccataagagaagtgagattacagggcaaactactaccttcagcatcaccccgcacccccaaccccactaaatagaaagacaggagaatacagagaatcataacacaggcgcagaaacctccttgagagagccagggtagataaacatgaactgtaattgatgaattcctggaggatcactgtggatgacctgaaggattaaaaactctagagggactcactcaaaggagggcccaagcttttgtgattttttttttttttttttttttttttgccacctgaagctctacaaggttccaaaggtgaatattaaggaaaatccctcatgctctggcagccagaggggaaaaggaacaattttgaaatatgccagaatatcgttcttaacaatgtctgccctcaggagaagatgtttaaccagagcctaatcttctggggttttctgagagcctcattgatctgggggaagggaaataccaactccagccccttctagccttccaagtggagaaagagaaacaccaaattctagcctcctctagctttcaacttggaagaagggaaatacccagctccagccccctctagcctttctcccctagttcagaggagagggatagagaagcatttgtgaagttcaccgtttagagacataggttcactaaaagactgagagctactcatagaaccacagaatgccttccctcccccaacacctcaccaccacattactaaaggtctatttatagcagttccgtttacccagtacaccatgtccacctatcaagaaaaaattacaagacatactaaaagccaaaacacacacacacacacacacacacagttgaagagacagagtaagcatcagaactaaattcagatatggcagggatgttggaatgatcaggctaagaatgtaaaacaactatgccaagaagtctgatgcataaagtagcatgcaagaacagttgggctatgtaagtagagagatggaaattctaaaaaaagaaaccaaatgaaatgctagagatcaaaaacactgtaacagaaatgaaaaacgttgttactgggcttattaggagattgggcatagctgaggaaagaatctctggccttgaggatatcccagtagaaacctccaaaactgaaaaaaaaaaaaaaaaaaaaaacccacacacacaataacaaccacctgaaaaagcagaacagaatgttcaataactgtgggacaattacaaaagatataatatatgtgtaataggaataccaaaaggagaataaagagagcgagaaatagaaaaaatattttaaacaataatgactgagaatttttcaaaattaatggcagacaccacagatccaggaaactcaaaggaaatcaagcaagataaacataaaaaagtatacctagttatatcgtagtcaaactacagaaagccaaagataaaggaaaaattctgaaagaagagtggggggataatgtcttactatagtaaaagagcaatgataaaaattacaccctacttcttttcagaaaccaggtaagcaagaagaaagtggaatacttaaagtgtcaagaaaaaaaatccaatctagaattctatactgtgcaaagttatcatttaaaagtgaaggagaaataaagactttgttagacaaaaattgagggaatttgatgccttgtaataaatgttaaaagaaattatttagagagaatgaaaatgatctaggttagaaatccagatctacataaaggaaaggcattggagaggaataagcaattgagaatatgtttcttattctcaattgatctaacagataatagtttattcaaaataatagcaacaatgtgtttggttgtgtatgtttatatatataagcatacataagcatatatagagtattttttgttataaggtactcatactactcatgaagtgatacagtgttatttgaaagtggatttgaattagttataaatgtatattgtaaactctaaagcaactactaaaaaaagattttttttaaaaaagcatgactgatatgctaaaatgaagaaaatgtggaatcctataaactgctgttcaatgaaaccacaaaagccaggaaaaagtgtggaatacaaacataagaataaaaaataagggaaacaaatagaagatgataacaaatacggtagacattaatccaaccatgccaatactcactttaaatgtaagatggtctaaatgagccaactaaaagacagagattttcacagtggatcaacaaacaagacccaaccatatatgttgtctacaagaaatccactttcaatatacagacacatatacactaatagtaaatggatggagaaaactataccatgatagcagtaatcaaagtaaagcagaagtagctatactattatcagcagagcagacttcagaggaaggaaagttatcagggataaaaacgggcattatataatgacaaaggggtcaattctccaagaagccaataatccttaatatctatgtgtttagtagcagagcacaaaattataagaggcaaaaactgtgataaaactggaatgagaaatagattaatccacgatttcactggagacttcaacatccctttgttggaaatggtcagattcaacaggtaaaaaacctataaagatataattgaactcaacagcatcatcaatcaactgtatctaattttcctctttagacaaccttatctaacaacagcagacttaacatttttttcaagttctaatgaaatattcacatgcaatattcaagataaatcacattctgggccataaaacatatattagcaaatttgaagaaataaaaattatacaatctctgctcccagaacatagtggaattaaactagaaattcataacagaaggatagatggaaaatccccaaatacttggggatgaaacaacacatctatagtaacacataggtcaaagaagaaatctcaagagtaattaaaaagtatagtaaacaaaatgaaaatgaaaacactcaagacttttggaatgcaacagaaacaatgtttaaagggaaatttatagcattgaatacatatattagaaaagaggaaatatataaaatcaataatctaagctttcaccttaggaaactggagaagagcatattaaacccaaggcaagtagaagaaaaaaaaatacaaattggagcagaaatcgataaaattagaaacaggaaatcaagggagaaaataaaaccaaaagctggttatttgaaacgatcaaaaaaaatcaataagcctccagtcagactaagaaaaaagaaagaggagagagagagaggttgaagacataaattactaatattagaaataaaagaggggacattttgacggatcccatggacattaacaggataataaagaaatactatgaacactctgtgttcacaaatttgataacctacatgaaatggaccaattccttgaaagattacaatctgccaaaactcacccaagattatatagacaatctgaatagggctatatctattaaataaattgaatcaatagttaattacttttcaaaacaggaagcaccaggcccagatgggttcacaggtgaatttgccaaacgtttagagaagaaactctaccaattccctaaaagctctttccaaagatagaagtagagggattgctttctaacttattctgagaccagcattactttaatacctaaattggacagacattacaacaaaagaaaactacagactaatatatttcatgaacataagtgcaaaaatcctcaacaaaaatttgcaagtagaatccaatagtgtataaaaaaaattatacaccacaaccaaatactgtagcataccaagtgcgtagtatcccaagtatgtaaaactggttcagcattctaaagtcaattaatgtcatccatcaatcacatcgacaaactaaggaagaaaaaatgacatgatcatatcaatagatacagacaaagtatttgtcaaaatccaacatctatatatgacaaaagctctcagtaaactagaaatataggggaacttcctcaacttgataaggaatgtctattaaaaaaactacagttaacatcatacttaatgacgataaactgtacagaagctttctcactaagatcagaaacaagccaaatatgtcatctctaataacttcttttcaatgccatgctagaagccctcgctaatacaataaataagacaagtaaagaaaataacaggtatactgattggaaaggaagaaataaaaactgtctttgttcacagatgtcatgattgtctatgtagaaaatcaaaagaattaacaacaacaacaaccaaaaaaaaaaactcctgaaactaataagtgagtatagtgaagttgcagggtacaaggctaatacacaaaagtcaactgctttcctatgtaccaacaatgaacaagtaggatttgaatttaaacacataatgccatttacattagcaccacaagaatacacaacacttagatataaatctaacaacatatgtacaagatttatgtgaggaaaagtgcaaaactctaatgaaagaaattagagatgatctaaataaatggagagatattcaacattcatggataggaagactcaatattgtcaagatgtcagttcttcccaacttgatgtatatattcaatacaatactaatcaaaatcctacagagttattttgtggatattgacaaactagttctaaagtttatatgtagagacaaaagacccagaatagccaacgcagtactgaaggagaagaacaaagccagaggactggcactacttaacgtcaagacttaccgtaaagcgacagtaatcacgacagtgtggtatttgtgaaagaatagacctctaccaatagttcagtggaataaaatagagggcctagaaatagacccacataaatatagtcaactgacctttgacaaagcagaaaacaaaaggtactggaacaactggacaaccacatgcaaaaaaaaaaaaaaaatgaatctagacacagaccttacaccctttaaaaaaaatggatcacagacctaaatgtaaaatacaaaactgtaaaactcctagaggatgggataggaaaaaaatctagatgaccttttagatacaacaccaaaagcataatccatgaaaaaaagaactgataagctggacttcattaaaattgaaattttcttgttgtgagagagacattatcaagagaacaaatgaaatgacaagacacagactgggagaaaatattaacaaaaggcaaatatttgataaagaactgttatccaaaatatataaagaactcttaaaacacaacaataagaaaataaacaacccaactaaaaagcgggccaaagatcttaacagatagctcaccaaagagagtatacagatgataataagcatatgaaatgatgctctacgtcatatatcatcagggaaatgcccattaaaacagcagtgagataccactacatatctattagaatggccaaaatccagaacaatgccaacaccaaatgctgactaggatgtggaacaacaggaattctcattcattgctggtgagaatgcaaaatgaaaggtgactttagatgacaaaattcttacacatttttgtaattcttacaaaattaaacatacttttactaaatgatccagcaattgtactccttggtattccaattccaacccaaaaaagttgaaaactcatgttcacccaaaaacctacacatacatgtttatagcagctttcttcataattgccaaaacttggaagcaaccaagatgcccttccataggtgaatggacaaactgtgatacatccagactatggaatattattccatgctgaaaagaaatgagctatcaagctatgaaaatacatagaggaaacgtaagtacttattactaaatgaagaaactgatctggaaaggctacatactataagattttaactatatgacattttggaaaaagcaaaactatggagacagtaaaaaaaaggatcagtggttgctagagggtggggagagggagggatgaacaggcagagcacagaggatttttagagcagagaaactattctgttagatactttaatggtggatacgtgtcattatacacatgtcaaaacacatagaatttgcaacatcaagagtgaacccaaatgtaaactgtggacattgggtgattatgatgtgtccctgtaggttcgtcaattgcagcaagtgtaccactcccatggggaatgttaacaaggagtatgctgtgcatgtgtaggggcaggggacagagtccactaaaaaaaattttagataaactaaggctacttccatctctactctgctgactcaagcaagatgctatatgtacatattttatggaaatttttatgaaaagatgtaatagaatcaaatctcttaatggacattgatagcaaacatttaccagacaataatttgacaccactatgctgaaccaattcacaccagtctctcagaatgttgtgcatgttaccttgttccttttcctaaactatttaataacacatatgccaatggtgaaaataaaatacaaaatttaagaacaactgacattggctgtgaactttgtagtttataaaacactttcacattaacatctcatttgatcctctctacaacctccctctagaaaaaggtgggaataaacaaaaacaagcaagcaaaaccttcgttttgaagaccttaggaattagcccaaggtcttatgactggtagatggttgaggtgagattcaaggcaaggccttctggccataacacaccattccttcttctttctgcctctctgtccttatgacttgacacataaaaaatgctagaaagtgtcacatctgtaccaccggggagactctgtgtgaaacaatagtttcaaggagggtcatcttttcagaaactgcaatcacaaaggatgcattctgtactttaaattttgtaattccagcctaggcaacatagggacaccctgtctctacaaaacatctttaaaataaaatgatataatgtaatacagtataatatggtatgatataatattttatgttatattttcccattgtgttgaagaaaatgtttaaggtgagctcttttcctgtctttctcaaaaaggtatggcaggatcgtcatttacttgctatcctgccttggtgttggcgtcactggggttgtggtggcctttgcaccaaacttccctgtgtttgtgatcttccgcttcctgcaaggtgtatttggaaaggggacgtggatgacttgctacgtgattggtaagacattcttacaccatcttctctatttggaaactagggccagatagccaacaaatgctagttaatcaaccttcctcttcctcatgtgtcctttaacaaaggaggtttcactgcagctacagtaattatttctgcagatgggagagctcagaggtaggattctgagtgctttagaaactaaaataccaccttactttgggagccaaatatagaatattataaagcactggggcaaactacttttatgtacttctacactgttataatatggtttctagctttgctttataagaaattaatttttataaaatctcagtagcttcttgaggcatttttgaggcatttttaaagcattttctctgcactgtgttatgtgatacagtttgagattactttcctgtgttgccaactctcctctttctgtacaagtgggaaactttttactatgggagaaataggttctaaaaatgagaagttcatttgtgacccttggataccttctatagccagaaagtttgaccttctggtgatggaagaaagaaaaagttcactttacttttttctcatgtcccttgggaaagccctggctactccttttggttccatttctagcttgggaccagccacttactttaagagtagtggtggatttctgaccaggaaaatgtgaattctcatcttagattattgctgcagatctttgcacttccactctcctctgtcactgctatacaatctccaagcagtgcgcattttggagacccctgaagacctttctgtgagtgggagaaggagagaagatgattagagggattggttgtcactgtctggaacagaaggagtaacattggaaggcaaggcatttttaaggagactcagcctaggtgaatcttcaaagttgtgatctgagggcaacaataaagtagcctatcccaggataatcagaatatgagaaaccaattagtgggaaggggcaggaaaggaaaagatttcagcaataaaatttcccatgtgatttttagagcatatcctgtcaatgaaaagtataacactgtggagagaattatcatttaatagaagttgtcttgtgataacgaaaagtctttgtagagtcttatatttataatgaatcttctaaggagactagaatgtgcatatctctagagatacagtgataaaatgtagccatcttaacatatttatgttttgataattacaattaccttttaaaataatcatcactgaagctttcctaaaaccaacacagatattcttcgtatttccctattgtacccagaagagtgctggtctgggtgcataagaggaacatggcaagtgcctgtgataaatggcagaggtgagagtgggagaaaagcatttagtatcaagaaggacacctccatcctttctgcaagtgtggaagcctccgtatctgagtgctagcgtgttctagcaatgctgatggatgtaacaggtgtaacatctctgtatttgtttgtttattttggagctgaccttgtgcttctgtgacctcttgtgtttgttttcctttagtgacagaaatagtaggttcgaaacaaaggaggattgtgggaatcgtgattcaaatgttctttacccttggaatcataattctccctggaattgcctacttcatccccaactggcaaggaatccagttagccatcacgctgcccagctttctcttcctcctttattactggtaatgtggttttggttatcatcatatttatactgattctgcagaaattagactccaaacagacatgaaaatgaaagcaataaagaaaattttcttttttttttttttttttattatactctaagttttagggtacatgtgcacattgtgcaggttagttacatatgtatacatgtgccacgctggtgcgctgcacccactaatgtgtcatctagcattaggtatatctcccaatgctatccctcccccctcccccgaccccaccacagtccccagagtgtgatattccccttcctgtgtccatgtgatctcattgttcaattcccacctatgagtgagaatatgcggtgtttggttttttgttcttgcgatagtttactgagaatgatggtttccaatttcatccatgtccctacaaaggatatgaactcatcattttttatggctgcatagtattccatggtgtatatgtgccacattttcttaatccagtctatcattgttggacatttgggttggttccaagtctttgctattgtgaatagtgccgcaataaacatacgtgtgcatgtgtctttatagcagcatgatttatactcatttgggtatatacccagtaatgggatggctgggtcaaatggtatttctagttctagatccctgaggaatcgccacactgacttccacaatggttgaactagtttacagtcccaccaacagtgttttcaaacatctctaaaatggctacatgctttgagaatttttagagaattttaggatttaaagagagtatttgttgatgattttattaataattgtgaagaaaaatgaattaataaaataccagaacgcaaaattttaagtagggtactgcattatgttttgttttgtaataaatagcttcatgaaaactataaagtaaccaaccatatctgccagtatttcaacatgcaaattaaatgcaatgaagtctatttgtttctctgtgtgttctataaagcaaatgaatattactcagaaattctctgaggaataaggaaatgttaagagcatcaaaaaattacattatcaaaaagcaacagaaaagcatttgatttttgttgttgctgttttgagatggagtctcactctgttgcccaggctggagtgcagtggtgcgatctcggctcactgcaacctctgcctctcagattcaagtgcttctcctgcctcatcctccccagtagctgggattacaggcatgcaccaccacacccagctaatttttgtatttttaatagagacagagtcttaccatgttggccaagctggttgcaaactcctgacctaaaatgatccacccacctcggcctcccaaaaggctgggattacaggcctgagccaccacacccagccagcatttgatttttattggaatgaacatgttttaatgattcttctaatttaattttaatatatgggcaagtcagtttacataaatcagattcctaagcttttcttaatatttactaaatcccaattcttttcatatatggaatcaatatattgtaagatagcctggttttgcaagagcaatgtcatgttgattattttgatgagcaatgatccaattatcaagctagcatttttccccatccattataaccttgcaggaataatctgtatttcagggacctattatcaactcttattgactcctaaatgtatatctaattgcaagatccattttgatagaaaaactcaaggcaatagattttagcgtttgaaattcctagacataactcacaacagcctccttctttgccagggtggtccctgagtctccccgttggctgattactcggaagaaaggagataaagcattacagatcctgagacgcattgctaagtgcaatgggaaatacctctcatcaaattactcagaggtaatttctttcagtatgagtaacaaatattgctaaagctggtgaattgattttgttgcttcttgtgtacttaatgttgcttcttaaatttatatacaaaatatgcatattatatatatatatgtatgtatgtatatatgtatacacacacacacacactaccaaacatctgggaaatcattttcagtttgacttaactgaaaaaaatctagggaaaaatcataggacatattaaagaagaaatgattatgaagctctattagcattatagccaaggttaattgatcatttcagtacatattttaataattgcaccaagttacttgaattattatactttacttactgtaagccccataatattgaatcattcatcttgattgtacaaactgtaaaactttttttgacttttaatttaaatctttaagtttggccctgaaaaaaaatctgtttattcataccagagcttgagcagtaatgtaatatttcagcctctaaactcctatatgctggtctttctccctttcttcttttcttcctccattccttccttcttccaagaaaggctttttggatgcctctgcatcagtgtaccaagaaataggggagggccgggtgtaatggctcactcctataatcccagtgctttgggaggctgaggtgggaggattgcttgagcctagaattctagaccagcctgggcaacatagcaagaccccatctctacaaatagaaagttttaaaaactatgtgggcatggtggcacgcacctgttgtctcagctactcaggaggctgaagcaggaggatcatttgagcccaggactttgagactgcagtgagccatgatcacaccactgccctccagcctaggagacagatcaagatgctgtctctaaaaaagattttaaaaaaatgaaatgggacaaaaattaaaagcttttgccctttggaatatttgatatgcacttgaggatataacatatatttaaagcaacccataaataattagagaatagcatataaagaaaaatatgatgatgttttagctccaaagactaagtgactacagaataacagaaaggttgttataaaaggaatgttagagaagaatttttggatgatatgaatcttgatttaagactaggttgtcaacattgttttcttcatagcattcagtttgatttcacaggaaccttctgataagaacgttctgataagaactgggttttggggctgggtgcggtggctcacacctgtaatcccagcactttgggaggccaaggcaggtggatcacctgaggtcaggagttcaagaccagcctggccaacatggtgaaaccccatctctactaaaaaatagaaaaattagcgaggagtggagacgagcacctgtaattccagctacttgggaggctgaggcaggagaatcacttgaacccaggaggcagaggttgcaatgagacaagattgccccactgcactccagcctgagcaaaaagagtgaaactctgtctaaaaaagaactgggttttgttggttctattgtcccctccccagcccttgaagcttggtcatgtatatttggatttctgccttcttcctctctcttatattaagtggcaagcagtaggctcttttccaaaggtttcaactgaacagatgtcactggtgcaatggtgcaagtacattaatgatgtaccttgaggtttacagatcataaaatgtgtggtaaagataaagcatgatctttttaaaccactatgattagtccatccttgtcactctttgagtgaacacatttgagctgtgtgttccttttagggaaaaataatatacccctgtttcccagcttgcactcatccattgtctatagtcctcatagccaggtcaaagatctgatcatttgtattcaattttaatcatccagtgaataatctctgctcttttgcacacatagtccagaggtaagtccaaggttttgatcttgatttaaaggtctaaatatagaaatatatttaggaatatagaatatagaagaaacaaatatagaagggaatatagaaaaataggatcatagaaaataaataggaataaagaaaggaatatataaaaataggaatatataaagtgttctagaaaaataggcatctagaaaggaatatagaaaaataagaatatagaaaggaatatagaaaaataagaatatagaaaggaatctagaaaggaatatagaaaaaacagctgtgtgctggtagcttgtgaaatataatgttggattaaccaggcatgtcatgtgtgatgatagtgagtatcactgagagatgagtctgattccccgaagcagctgctgttacacatcccatgagtgtacagtttagcactgctcccacagacccactgacccagctttattcatgagcaccgtagagatcatgacaacaggtaagtagttcaatgttccacatggctgtgcttatgagagatcatgaactatgggatccagtggcttccaagtcattttaattttaatatggaaatttccaaacatactcaaaaatacaaaaatagttgaatgaatctctatgcatatccctcagctccaacagttaccaactcctgatcaatcttagtttttctatactctgcctagtttccctatccactgagtaggaatcaatccagccatcatagcatttcatcttgtaatattttcctctaaagtaggaacacataggtatctctggaactatgtgtgcactatcttcaggacactgctgaaggaggagcaagaactattcctgtggttcttaaaattcaatacaagtaatcacacctttgatccacctgtggggactgatccctcttgtgggagcaaagatggggccatggtatataaaatataaatataaaactaatatcaatgtcattgtcctaagaaaaataaccatgattccttaatatcaagtcagtgttccacttccctgattgtcctacaatgtttcaccctgtctatgtgcattagactcctcctgaagttatggattatgaattgttgatctctttgggtttatttaattcataggttcctgccctttttcatttcattccaactttgggaataaaaaaattcctggggtttttctcctgaagaatttccacagtctaaattttgttgattatatctgtaggatcctttaacacgtttctctgtcttttatattccctgtcaattggtagttagatctagagcttaatcaagttcaagtttaatatttctggcaagactacttcataagtggcttagtacatttccattgagagatacctggtagctgcttgtctcttcttttggaacattacttgccactgataatcactgcctggatttactaactcatcagaggttgccaaatgacaatattctcatcttatcattacttcttcatttattgctgcagtgcttaaataaagaccaatttctcccatcaactcttggtgacactgagatatagctcatatagggaagacaagacatatgcatcattttttcttttccaaataataaattggctccctacatcctcccaaagtgattaatgagttgagtgtgtttatttaaacatagtttatatgtttcaatcctttgcaattgcattagtctgttctcacactgctataaagaactgcccaagactgggtaatttataaaggaaagaggtttaattgactcacagttctgcagggctggggaggcctcaggaaacttacaatcatggcagaaagggaagcaaacacgtgtttcctcacatggcagcaggcaggagaagtgccgagcaaaggggaaagccccttataaaaccatcagatctcatgagaattcactcactatcatgagaacaacatgagggtaaccatccccatgattcaattacctctcactgggttcctcctatgacacatggggattatgggaattacaattcaagatgagatttgggtggggacacagccaaaccatgttaacagttattttggtgagtactctttcggatgctcaaattgctccatctttgggcacacgcagcttatccagagtctgccaccctctagtagcttctgaatacctccttgctctttagcacgatgagattttccagtctcatcttgtaagttccagtctcacacatggaatcacctatttctccaagggagctttggtttttgaaacatatgtcttcaaaccgaacctacccatctttaatctttttaattgtacagcgtaagcagaaaagcaaagtgttatcttcaagagaaggatttaacatttaagtttaaaacaccttgctaaaagcggaattcagccacattatgggccacgtcatagttttccatctcaaaggtccttatgtccccacaagcaccatcctgagcagaaaacctcttcgtgatgacgcagaaggactggccagcagggtaggcactgtacttgaactccaaccccaaaaatcacagcaggattccattataggttttgtgcaatgacaggtatgaccagtataaattactcatattttgtgattcaaatacatactgtccgtgtctatgttaggatagccttgaaactgtatgtttacacagttactttcacattaacccacatccctctctctggatacagtttccaggatgttcagacccacgactgaagttcccagcaatctctttttacttttcacagaatctctcttcagtaacttctgacttttagaagacgttatcactgtgtaaatgacctcatccttcacgacctctctaattcccacctcattctcagggtgcccattatagggtgcggagaaggttagaatggatttgaaagaatgtggttggattcaaagaagccctaggagacccaacaagtcagcatttttctcttgtgaaaagaaccacctgccaaccccagcctgttccattgctgacatcagaggatcaggtatatttaggagaagctaaggacctagcttaaatctacccaaggatgttccatattacagataagctaaattaactacaaactaagattacaccaatctccagagctttagtgagagaagggaaaatatgagaggaaaatagtatgacagatttgatccaacattgaaacaggtgcattttgagggttgtttatcctgtaaatcatctcagttacagttcacatggatgttactcatttcatgggtaggcaaactctgtctctgcctcacttgttcctaggcttccatttgccaaggtttctggctggcctctggctttgttgaagagatagctagcactagcagggagaaatacaggtgatcagagtccaggctctctgaacatacaaacagtataactgttgttcactaaatggaaaaatcccaaaatcaaaaaccaatgcaaaacagtgaagtggcttgagctcctaggaggttaggtagaaattaaagagaatcagtggatgggtagaattttaagcagtaggtagttacccaatgtagaacgaggattagcttagacacctagtctggtggttctcagcctttcagcatttgcatacgataacttttaaggcttacttaaaaaaaaaaaacaaattatgggtaagtctacaataatgatagcacaggcacagctacagcatgacagcgtctcacaatgtcttcaggagcatccacaatcatccactgaccccagagagcatgtcaaggatgagaactgctttctgccctggccacaccctctgttttgctcataatgcaaagttcttttacagtgcagtaaatgtgaaatttttctttggtattagttagacattattcctgcttgttacttgtagtgccctgtttcttgccttacacctggtcactaaccactcaattcaacttttcactctcatatgatagacaagtaatagtactgtgtgcaagtgtgaataatggatggagtaacaatgcttatctgaggatatggccattgccccaggtactgaatttgtgtgcttgtcaaaataaaaaagaatgggcaagtacttcagagtgtccacacttctggtggtagtagacttggtctattggtgagtaatggagagctgggattgtttctaagtaagcatgaactgctaatatctgtgataaattgtattaatcctctcagctattcacttcctctctgtaagaggattttacatcccattcccacccattgccagatgattgacagcagtatctctctgtaggcaatatacttccccacccagtgtcaggcttggccacctgacttgattgcgcccaaggagcagaagtggcagaatatcaattcagggcagaagctttgagaggcatcatgaattcctgacagccctcttgctccttctgtctgccacaagaacagcagatcccaaatcagtgctgttccttcagggtgggtctcagaaggagagctacagcctggagcagagctgcagcagctgacctacagctgctgtatgggacatggccaagaaaaagctgtttccccagtaaactactgctcaatgtgtctgcatgtactacagagatttgggggtatctgttcttgcagccaaatctagctaatgcaattggtcatattactagttcaactgccagagtagggttcaacacattctttggtgatgcaggggtatctgattgtggtagattaaattactgtttggagagattcacattttccctcatttccaagggatggaaatacttcctgggtctataaatgttgggcatggcaatgatattgctttggcctcatgataggtgcagtggacttcctgccctttgatgttggggttgaccatgagacctgctttggccaatggcaggttgctagatgtgatgcaatagaagcttgaaatgtgcttgtgtggttgggctttatctctgcacctcagccatcaccatgaagagaaaattcccaggcttacctatgggccccaaaggaggctgagagacattcagaatggagttgacctagcaaagcttcctcaaacctacactagcaggccccagccagcccacaaacacatgagataaatgaatgcttactattctatgctgctaagatcgatggctcttatgcagcattatttatcaatagctctgatggtaaagtgtcaacttgattggattgaaggatgcctagatagctgggaaagtattgtttctgggcgtgtctaggagggtgttgccagaggagattcacatttgagtcagtggactgggagaggaagcctcccctcaatgtgggtgagcaccatccagttggctgccagtgtggcttgaacaaagcaggcagaaaaaggtgggataggatgtcttgctgagtcttctagctttcatcattctcctgggctggatgcttcctgcccctggacatcagactccaggttcttcttgcacttacatgagtggtttgccaggggctctcgggcctttggccacatactgaaggctgcactgttggtttccctacttttgaggcttttggactcagactgagccactcctggcttcctacctcctcagcttgcagacaacctatcgtgggacttcaccttgtggccgtgtgagccaattctcctaataaactccctttcatagatatgtagatcctatcagttttgtccctctagagaaccttgaccaatataatagctgactgtgtcaacactgagtgagcagccactgtcactgtactgacctggatgatgcagctacacaggtagtaactgtggcagcagttttggtttcctttttactcccaggatcttaaaggcctttatcctaaagatccctctcctctgcccccaactgcccattcctcccgtttttgtatgggatatactcatagagaatagtaggttacagttctagctaacaagaagtctctgatactacagaactgaatatgcccatatttgttagtgatattttatcctatactggcgcaataaacccataagctttgatcgtagtttccttattttttggatacacttatgtattgtttatagtgaatctactgcttttaaaattaaacattagatgttatatcaataatgttcacacataaacatgcttgaggcagttcccatggtggtatgtttatgtgacatcaggaacggaatttgagctttccaattccaaagggattcctttaggcccatcatcaatataaatgataccattgtttgaaatatttgcaaaatagaaaaaattaaaacctcattagaaagtgtcttactgattttttttattaccttagttgtcagggagacttctagaccttaatagctaccgtcttttctataatttaatgagcagtcacacaaacaccaatattgctacagaaagggactttccagctttgggaatatctgtttctgacatttcctttcaaagggggatttttataaacataatttttcttcttccaaaagaggaaccacactatgattccaacttccatggagcccatcggggatggtggtatttcagttcaattagggtgctgtctttgttaactgttgtgtttagttgtgatctcagacttcagatttgaaatctctcttcggggaattcatttcaaaagatccagataacatagtttaggcacatggagtatctgagggcagtccagtgttggaatgagaaagattgagtctcaaaaacaaagaaagtctcaaaaacagttattagaaagaaagtcactgggaacccatccagcactttctcctgacagggctgtcttcctcctctcactttacaggatgaatggtgccaattctaccagcaaagccttcatctttaaaatgactcataaaaatggtaactgtagtatgtgtaccatcacactcactttgacttagaatatgcttgaatgcataaaaatatgtcaggacactggacatactcaacacagaatggaactttgtagccaataattaatttaataatacttcctattttaaaaaatagcctgagttctagaaatggtgtgtatttaaatggatttgtttactttccatgtctttagctttttgaaaacaagactatatcgcataaaatgagaaaactgttcatgctacagtgaaatagccataaagactgtaccagtaaacagttccatccacagcatgtcaagacccccaacttcctttctcaagcatggtgcccagcactcatttccttccccaaatggaaactcagcctggcattgctcaggtcagtgggctgtcattcaacaccgaaagatattgaggggaggatgttctcctacacctttaattgaaatggaaattcaatttaaaggtgctttaaagaatgagattgcagccttggagcaggctaggcagacttgtgggatgcctcatcagacagcagcattttgcacaaggaactatggtgagccagggcctttccccctactcacccaaactcatcttccagatttcctctgggaaaataaatcattgggccatgcctttatcaaaatgttaactatctctgctgtacaagttagggcttgaaaactattcgtcagaactgggaaaggaaagcattccacattatggtcccataaacttcctgcattcagtacttgcaatcaattctggtgtctaaggacatattactaaagagtgagtgtatttacagaacctaggacaacagagggactcaggcagtgtccagcagggtggccaactgtccttgtttgcccagggccggggagttgggagtttcagagctaacaccaaaaaaatgtctcaggcaaactgggtagagctgttccctccatgactgggtcagtcctcatctccccagttatgctcagaggaagattccaaaggtctacacttgcaggcgtcacaagtcctccctgcccatcccatgggccctgatgcctagaagaagacacgggattcccgcctggctggaggatgggtctgggatctgcttgccagccgttcccgggattgggggcaggttgctgagcctgtctagttgcctgccaggcttcccctttctttccgcaccccttcctccgcagagcctcatgtctacctggttcttcatctggtcctgagtccttgcccattctactgtggctctggccctgcttcattcctgcctgattcatcctcagaaggcaggtttctgtcctgtccctacacatccatggccttaaagcaagatgctgacgctgtcttgatggctggacctgcccttcctagagacggctgctgccaacccatttcccagacaagtacccaggccacagacagcagggccagcccacggaaaacacaaagcccttttttccctagctagcctctccatgtggaggaacaagtcctattgcttggtggagagccaaagccctttcctttctcacttactcttctctcactgctactgggatcctggcaaaccacacaggcaggtccatgtggcttatgacacaggagttccgagctttgcgacatgacattggcaactgctcagttatccgtgattagttatgaatctaaatgcgtgggcttcccccttttccttctcaaaggctgagcttccccttgccctttaggagcaaaagtcttcccctttctactccagcactccttggtaggcagagaagcatttacttcttccctgcctaccctgagccccggcagtattacaaacaaaagtaaaaagtaaaacacaaggcaaaactcatcagccacacgggcttgttttattccattaatattggttgttctcttttctgggagttgtgtaggcatctaatttgattattttagttatgtgtccctctctaatagaaaagaggagtgagtttgcctgtcctttttccgtttcaagcgtctgctggggaagggccttctgataccctctctggaatccttccactctatcagtgtgagggaagaggctcagcttcttcatgtatgttgctcctttgccatttggtccattcttgtgttttcagcaaaaccagtttccacaatccaaattactgtgcttctcgactgtggataaatgagaaaatactcctctctgtgaacgcgctccttcgtggagacagtaatgagtacaacttccagagctctgcgcagccagcaaccctggcaggagtccctgtgttattcataacccagagctgtgttgccatggcagtactgcttgctagaccttggacccaccaggaaaattatctttcttcatgaaataatcctaagaagagagatgtggcttgaggagcagatgaaattcatttaaattccacagcactagattgaacattgatgtacacagatgtgcccctttgacatagatgaagctggaggaaattgtactaaaaagtaagtaagtgagaaaacacattgtcattcaatctcttgaggtcccatccaggaagatgataaaaaaggtatcaggtgctggattttcatggaatcaatcctgctttccctagaaagaattaaaattaagatccatctcataaatgggtggatgaacacctgggttgtgttggcatagcaacacttcttcatgtgggggctgatggtgggacccacccactcatacaaacagcgtgcggcccatgcaacacagagatggctagattacttggtctggaaaaaataagatggtcctgctctgttttcttttttctctgaatttggtgctatttgagagacggaaatagaatttcatatacagaaaggcaaacagattgagacaaagtctttgtaaggtgtctgaataaaggaggtgttaattggtgatgaagtccttttatcctttgcgggagaaggatttagatgatgttagggaaaacagccagaaccaagaatatttttctgctacaggaatcttttgtgtaacagcaaaactatgtcaccttctttttttttttaagttatactttaagttctagggtacatgtgcacaacgtgcaggtttgttacatatgtatacatgtgccatgttggtgtggtgcacccagtaactcgtcatttacattaggtgtatctcctaatgctttccctgcccccttcccccaccccgcaacaggccccggtgtgtgatgttccccttcctgtgtccaagtgttctcattgttcaattcccacctatgagtgagaacatgcggtgtttggttttttgttcttgcaatagtttgctgagaatgatggtttccagcttcatgcatgtccctacaaaggacatgaactcatccttttttatggctgcatagtattccatggtgtacatgtgccacattttcttaatccagtctatcattgttggacatttgggttggttccaagtctttgctattgtgaatagtgccacaataaacatatgtgtgcatgtgcctttatagcagcatgatttataatcctctgggtatatacccagtaatgggatggctgggtcaaatggtatttctagttctagatccttgaggaatcgccacactgtcttccacaatggttgaactagtttacagtcccacaaacagtgtgaaagtgtttctatttctccacatcctctccagcacctgttgtttcctgacttatttttaatgattgccattctaactggtgtgagatggtatctcattatggttttgattttctctgatggccagtgatgatgagcattttttcatgtgtctgttggctgcataaatgtcttcttttgagaagtgtctgttcatatccttcacccactttttgatggggttgttttttcttgcaaatttgagttctttgtagattctgcatattagcccattgtcagatgagtagattgcaaaaattttctcccattctctaggttgcctgttcactctgattgtagtttcttttgctgtgcagaagctccttagtttaattagatcccatttgtcaattttggcttttgttgccattgcttttggtgttttagacatgaagtccttgcccatgcctgtgtcctgaatggtattgcctaggttttcttccagggtttttatggtttcaggtctaacatttaagtctttaatccatctcgaattaatttttgtataaggtgtaaggaagggatccagtttcagctttctacatatgtcaccttctttagtgatgaacatggagggtaagcagacagggaatcctggatgttcttgttaacacattcttgtctcctagccgctgtaacctcagccctggagttgacaaaagaatctgtcccagtgggccacagatcctagggattatggagttattgcaaagatccacaaaccattagcaaccaagccttgtctgttgaatgaattaatacatcttggattaaaaaaaatgtactttcttcagataaaattaaatacagttagaattaataaccaataataaattgaaaggtgttattaaatcatagtaaatttgtgtcattatgtggtctcaaagaacagaagtgaagagcacaattcctgtcatgtgggcaatctttaaatttttttgacattaatcagacatcctcatactcaaaaaggatgagtcactgtaagcacaaataaggtgtctctacctgttgctgagagtcttgacatacataaacttcatgacaacaacttctaggatcccttcatttctttcattcaataaaatacacttgagttcattatatttttatcttccactgaccttagggacaaattctgcatgttaagtagggtggattgagtgctgtgactcccaactgcctactgtctctcaaaggtgaataggatgggttgagtaccacggttcccagttgcctgtctctgaaagatgaatcttggccttttctggcttacatttcagagccaacacatgacaaatagtttagatcttgaggaagactgaggaaggcttatggaatactcagcacaattatttttatggcacagagtgaaatagagattgaatacttacacacgttttgattagtatgtgtgttccaccaggcttacacacttctctttgagatctgatctagacacatttttctaaagacatttcaggtattccctctgcagttcataacagtttatgcactgcattgatacaggctgctctcaagttagcaggggacaggtttttgatgtcaactaagtgaaatatagtatcaacttcatgtagggttgcttgctgccatcccctttctttccacaattctgtaaacaacttggtacattttgttgtctagaaatagccaacctctaaatttaaacaggttgagtattaaattattgcagtgaacattttttcacattaaaaactgaatcacagaattcttatttgatcaccacatgtttagaaaaactattttaatgtcactgacatgaagttgtcccagaaacgaaagggtatgggtatacacaatgtagcagtcatttatcttcatttgttcctccatttattcagcagatagttactgggtgctgtattcaaggcatctatttttaaaataacctctgtgaaatgttcatttcaaaaatgtctccccagatgcattcaagatgccttctattttctctaatcctctataattgcttttctttttccttttttctttttgagctgttttccttctctccctcccaataataggtctttatttaactatacttattttcatcatataaatatgcacaatataactaaacacgaagttgaagaacatgcatataagacatgtcttatatgcaatgtctggaaatcactacagtgtgttttaattttgattgatgtacacatagcctttcacattgaaatctaggtaaggtaagtacagctattaattatggaaactagtctatatatttgttggaatatgataaatcaagtcaccgttcaaagttgaataaatagtgaacacaatataacattaatgcagattaattaccatggcccagagaccagccatgagacataacatgcttcgctgtcaacaacattcaggattggaattccagagatggcgtgtgctactggcttatggctgatacgtaagagaatctcatctatctctaaatgttctgccttaagccgcacaaaggacgtaccagtgaacaatgagttaccatgtgcagaaaatattctgcaaatcaagaaccagaaaagtaagcaacccgcaaactccaaaactcattacatgattgtgatctttattttgaggtgcatctaaactgatcttcaaactcttcagctatacctgactttctctggaatacttctcagcattttcaaactaaaccaaaggctttctgagttacataaggaaggcaaaatttggatatttgacaaatttggaagcactgaaaatggaggaaattccgagatgacagtggttttggttcttgtggttcttgtggttttggttcttgttttttgaggggtgcagagttgggttacttaagactctgtgcatggctcaggcatcattgggctgtgcaacactcgtctcatgtcctacttgattttcttctccctttcctcctctattcccactcttccctcggcaggttcccactctaatgtgtctgatttatatgtttgctattaatgtgttcttatgaagtggagtgtgctgtgtgtattcaggtgatataaatggtattgtgccactccagatcttgtatttcttactttttcactcaactatgtgttttaagtgtctacccaacttgttcatgtgtgagtgcattgcttccaactgtcgtgtgattttcattaggccatacctgctgtgtctctggtctccatcttcctaatgatgggcacctgggttgccttcagtaattgtgatcggtgttttcatacatgtccttttctgacctgcgtaaggctctccatggagttcaaggcctagaagcggatcccttgggtcctggtgtgcaggcaagctttggaccctgaataacgccagcttgctttctgtgtctaccgcactagtgggacttgtgggtccctattgtctacatctagatttagtatgcttcagtttcctaatttttccagccccctcagtgctttaagttgcacatctctagttactggagattctttgtaccttcactggagcacttggaaaacagaagaaatcaaagggcagtcaggactctcccagcaggcagggaccaggtcagagtcaggatgaagacaaagcaccctgagcaagaagcaatggaagagatgcttgtgacccgagctgatggggaaggttgagggcaacgcagagaccccactgccgacttgccaagaaaacgtgcaggaaatgagggaaggctccattttcctgagaaaagggatggaggaacataggcagcatcaagctccagctactggctctttgagaatgtagtcgggacttgccccagtcacccttgccctgagaactcagtgactggggctaatgtcaccctggctgtccttgacctgtgcagaaagcactgccaaccctggacagtgggggaagggccttatgtgcccaggccccagcaggagacacctaccaggaatctagtgggacaaggtttcagggatcctggaatcctgcccacacccaacagctggaacagttccctcagctggcgagtggacaggtggtctgatgagctcatatgttattgatgatgatgttaaagaccatgttcccatagaaataattcccaaagcattcagaagactgagaagaagtgatgataagaattgttctgggcaggagtgtgtagttttgatttttacttgtgataaagcagaggatttgcttgaattcactcaaacttgctttttctctctcttcaaaacaactttggctgaccagtgtctcatagacactcaatttgccttttcatggaactcaaaattttgtgtatccatacatgctaccatagtttcaggcactgggcatttcaaaaatgtgatatttagaacctttctatttccgtgatgactgttggcatagatgctgctggagatttcgatgacatgttggattcagtccacgcaagttttgatgcatattcccttaatttctgagcctttagagttagagttttagaactgagagtacattctcttcttttttcctttctcctcttatgtcaacaggctcccttccccacccccccacccacacacacaaacaaaaaataaaaataaaacgctctcagctttgcttttaagaaatgaagaaatgttccaacatgtgacccacagctgcaatccgttcacctttgccaatactgaggctgccctctgggtccctcctgggactgcatagatagaggcccatttgctgttctgggcagcatgcccagtcatctaggaggtgggggactggggcactctttcaggccaactcaaactaatggaataaaatatcttctccatgcagtgtctcaaagaaagagccacctgggctgcaggtgaccagactcgctcagtgcagcacggtagctcctagcctcatgtgcagtcaaacacatgagatgtggcaagtctgaactgagatgtgctatcaagtaaactgtacaatggatttcaaagatttaataggaagcaaagagtatggaacgcctcatgaataatttcatattggttacaccttgaaatgatcatgttttggatctattggattaaatgaaaagtattataaattaatttcccctgtttctctttatgttttttaatgtggccactagaaaatgtaaatgtactcgtgtggctcacattatattcttactggacagcattggtccagaggactgggatttatttttaactactttaataaacatcaaacatttgtgataattttaatacaaatatttccccatcgtatatgctcttgcatggtaaatattttatctactcttgttttaaaggataaggaggttttcaaaaattgccgaagtactacaggtaatttggcaaattctcttttatgggtaccagatagtgctatttccacccagaagctggctacagctctgtaatgtgacatgcttactcctggctattctgggctggtcctcgtctgactaatgagctcattatccactgggcagtgggatggaaggacatgagcacctcagctgtcactgccgagcttcctcccagccccaccaggccctctggttcctgatgcttgtctgtaagaccaatgggtactttaacttttgaaggtggtttctggttcccccaatcggtgagcccaaagacctcaaataacattttattcacacagacttcttagagatgaaaagtttctagagagcagagcctttagggaactagtgatgatgcattcactgaataaatcacagtattatactcaagagcaaatacgttttctttcttattggtgtcatctttccttgtgaaatacggcaactgatgaagaagtctcctattgagaataaccagacgaaatcacaaggctagacaagcagctactaacaccatccccttccccctgcccatggtaaaccctgctggcaaatgtatttctccctcctaaacctgggaggactcacgtttctgcacccagagccccaggtggaagtaaacaatgggagtgagccgatgaggtgggattgctgttccttgactcttagtgcttctcatgctagtctcctggggatgcagttaaaatgcagattctctctctagatctggggcggggcttgttcagcaggctcccaggggagaccaacgctgctgacttgtgggtcatactttgagttgcaaggttgcgtacgtggtatttgccagtgtgcacattcatgaaaaagtatcctgccttaagcctggtagatccacagttccaaatcaacattaaatacatctggtatacttaagaaaattcaacataaaaagaaatccatttcttaaaaaaaaaaaaggcagagcaaccattctctttatctgaggacctttaaaagcatctgcctttatgtgtcacagcattagctactaattactaaaggaaaaagtgctgggtgaattatcacctgaaaataaagtaactctcaaatgttataaaacataagattaatgttgacagcctctgttactatgacatattgtgtgccaggtgtgtgtgtgttataggtgcatatatgtatatatatacacacttgtatgtatctgtgtatatgtacacatatctatgtatctatatagacagatgggttatttaaatgaattttcaaaacactaataaggtgtgatttgataaatgaataatatttaataataatattaaaataatatatttgaatattattattctcctgctactgatgagaaaactaaggctcaaacagtttaagtaacatgctagtaaaaaaatgttctgagtagaataccacatgtctggcctaaccctgactgtcttttttctgacccgagaccagtcctccacgtggggagctctgaacaccatatttataacagatggttatttataatgtctttctcttctttggcaatttaaatgaagacgtcaacttgaagaaatgtttcaccaggaagaattgcaaagagagctgaattaatcaaagaaagacgaataaagtgttcttttaatatggagtacataattgttgatggaaaacacagtcttggcagaattaaaagataatcaaagagatgaatagggcaaatagcaattcagctcattaaataaatacaaggaaactaacctctgcagtttaaccttgagcgataccttttcccatgaatagagagtgtcgatactaggcaacaagcctctgaacagatagtgttacccggaacatcacccttttctccctttgcttcaaatcaaaaccagcatcccccatttagacagcataaaaggtatgacaaaacgggacgccaagtgagacactgttgattctgtttctatgaaattctagaaaaagcaaaactgtcatgacagaaagcagatctgggtttccagagcccagagtggggggaggggactgacttcactgagacacaaggaaacttttggggatcatggaaagggtccgtaccacggttgtggtggtggttataagactatatatttgtcaaaagtcttcaaagtgtgcacttagaattgctgaagtttattgtacataaattacatgtaaatatcataaagtgcatgtaaatggtatgtgaggtaataaagcaattttttaaaaacaattttaaacctggtatagcattttgtttttttgtgtgtctgactcagaccaggcaaaatttagtaaccctttggcaacagaaaatcagcacagatatagagctagaagttattgtaaaagaataatagtggcggccgccacggcgcaggagttgccaagattttcctggatgaattccatccaagatacggttttaagtctctcaaggcctttggatgcctagaaagtgggtcatctttcagaatatctgcgtcactgtggagatgttagtaaatcaaagaccagctggatttgtccttaaatgtagcaaaatatgtacttgcttggaagtactcttaatcctttcattcactggacagggaagactggtttcacagtcctgactcccttcattcgttatcaacacctcgtattttttttttggtagatgatatatatgaggcagtaaacttgtggtctggaaaagcagagatcatattaccactctgttttaacttctaaaagtttgaaattaagacttataccaggtatttttatggagtggattggagtatagaagcaattattttaactatttgctaaaaaaaaattgcctaaaatattcagttattaaaggaaaagcattgttctggattggattcttcagataattctgcttttggcaacaagtaacagaaaaccaacttaaataggtttggacaataaggacattcactggctcgtgtgtctggaattctagcaacagcagcattcagggttggccagaccaggatctcaacaatcttattaaaccatggttttcttctcctctctccactctgttgacaggatagcttcatcttaagacttgttgtctcatcagtgtaagatgactgctaagttgtatgtgagcccacaatttcctcattcattccttgaaggaagaaaaaagatttcttcaggaacttctgacttaaaagcaatgaaggactttcccagaagtccatttctcattggcccgaattgggttgtatgcccatttctcattggttcaaattgggtcacgtgcccagtcactgacatggaggatacgatttccctaaactaatcaggcctcccgctacaactagaaggagactcagctcccacaaacatatgaattgatggtgcgggagagtgtagtgggaattctgttaggaaagagaaggaagtcaacaatcgggtacgctgtgtctaatttaagtccatgactttaaaagtgagcttttttttttgttacaaaaataatgtaggcttaattttttttttttttttgagacggagtctccccgacacccaggctggagtgcaatggcacgatctcggctcactgcaactccgcctcccaggttcaaacgattctcctgcctcagcctcccgagtagctgggattacagatgcccaccaccaagcccagatattttttgtatttttagtagagacggggtttcaccatgttggccaggctggtctcgaactcctgacctcgtgatccgcccgccttggcctcccaatgttaggcttaatttttaattttcagagattatttgtagctgaaaagaagaaagtaattaatgaaatgatacggcatacttttaaacaataaatatcatattctacatactgcagacacattaccgcataatggttaaaaatacagactttgctatcaacctcctggttcatcttcttactgtctgtgtgtcctccttgggtaaggtacatagctttcctccacctcaacttctttctctctgtaataggaatgatagtagtatctgtacaagtttctccagcactaagcctctcattcaggggtcagcaaactacagcttgcaggccagacatgcaggcaacctgtttttgtaaataaattttattggaagccatttatgtatcgtctatgactgttttcacactacgatggtaaaggtaagtagttccaacagaggtcttagagctcacaaaaccaaaaacatttaatatatagccctttgcagaaaacgttcgccaacctctaggttaatacataagatctttattttcttgtcaaaatctaacatgtcataattctgtggtcattgagtgactggagatctgccagagaaaggcaattatctacagagctaacatgaaagcaagagatgctcctttattttatcacttaaaaacagtgaagaatcatgaacaactgaaaaatctacaaatgtgtttaaatgtcaaattaggctgggcatgatggctaatgcctgtaatcccaacattttgggaggcgaagtcaggaggattgttcaagcccaggagttcaagaccagcctgggcaacacagcaagaccctgtctctactactactactactactactactactactactgctactaataagccaggtgctgtggcatgcacctgtggtaccagctactcaggaggctgaggtgggaggattgcttgagtcgggaggttgaggctgtagtgagtcatgattacaccactacactctagcctaggtgacagagagagaccctatctcaaaaaaaatttttttaaatttttttaaaaagtcaaactatctacctgaactgaccagagatcttgaaatatgtgatgtaggatttcccttcaactctgggatgttggaactggaaacttgagtgagagtgaatttgttcacactcatagctagtggatagaagtcatagctctcagcagaagtctgaagaggaaataaaagagagccagtaataaattgctgtgaatatttcttttgaaaagcaaagaaaaaagtattgccacctgtgtgtgctgaatggacagtggtattgatatgtagacaagggatcctgtcagggaatccctggagagagaagagtctgagactgacactgcccggcagccccaagtctgagttgtggaaaagccctcagtaaaaggaaaaactcatggcaacgagttggtggtgatactttcatggaggaacattgtccttgcaggatgggtggttttaatcctgaatttaaagatctttaaaatctaaattatctagtcaaatttttttcataaaacaatgttttaattaaagattcagttttaggtcaagtgcacagtgtctttctttaaaaatatttagatgtggccatcaactatcaagaatgtttctagaatgaaatatattcagcagtgctgtgtggggatcaggaacacaggctccaccaatcagttgcctggtttcaattcctggctgatttacctgtgtactattcactcctgaaagtcctaagccttgttttccttatttatagaataagattaacagaagtactaactttatagagctttgatgagacttaaaataatccacgtaaagtgcttagtctagaatctaatatcacacactccataaacactagccattttaatgtattaacacatagaaatgaattgtagaaaacattttggcaacaaactataccataatatatatttgtaatctatggagttcctatctttcacttttgatattcctgtcttgttttttgagcagcaaaggttaaggtagacacagaaaaatccctcactggggtcttcaaatttagaaggttagctcaggggtcatcttaatagacattatattagttaagatccaggtcaacttgctaatgaaacaaggccccaaaaatacagtgatgaaaaagataaaagtgtctttctctctagcacacgcacacagaggtgagcagccaagctctagtgaggcagctctactccatgagttccatttatcttgcatctccaccatcgcctacacaggtggtatggttgaagctcaccagcatcttcttccagcaagttattacctttttaaatgcagagacctagaacttatacacatgacccctacaaccacctcattgctgaggtcttaatcacagtgccactcacagttgaaaaagaggatagaaaaaatgactgtcactaggctgccatatgcccaactaaaattctacgtattctcaaaagagggaagggaagcatggatggtggaatccatcagcagtcttccacggcgattgtcatggaaactattgttttgttgactctagacactattgattttaagacacatagtcattttatgtaccactaagtaaaggaaaccatgttgtttaaactgggacacatttctttcttaccagctcagttgtaggacaccttccaattaagagatgttaaaatgtagaaaaccaatgtgtcttggtatagaagaaatacaggattgtgaagactttggaaaagaaagtgaccaaaggcattcattttgcagtctacttttgtgtgtgtgtgactttccttggagcaaagataggcataagatatcaagctttggttgatctattgaatttactgtttagaatctgtgattgacaaggtactatcagtgtgtgtatgctctaagtcaaattcctgtgattactggtagagagactttagctcaaagctttggggaaaatgtgcctagattttcattcaatctgggccaaatctggagttgtacaaatagatagcatcggtcttgtccttagtagccagcatttttgtttaataggaggagagaaacccaggacgacactgaggaacagatatgaccagggcacttgacttcttgtttcagcactcagtcattacacaaacagttgttgaacaccaggcactttgcttggtgtgacaatgcactcccgccttccaagagctccagacccacaggggagtgctgttgtacaggtgctaggatagaggtccggggagtagaggcagaatttgggagccatcagttctatctgaggctaggaaaggcttcccaggggaggtaaaatcaggactgaggaggtcaaagagccctccatgcagaggtaagagactgacaagcacaggaaactggagctgcggtcactgcagggtatcatgctctgatgcttccgcatgttagactggaggcaggatgtggggattggggggtgtcctctccagcttcgcttttttcagtgttttgtatgtagttggccaatagcagtatttgttgaattgaattgaaaagaccagtttcttggatggccagctagagatgagctgaatttttctggatcaaaaagatgttagattacaataaatgggcaaaagcaaaataatacctttggtgcttactcttaaacttaacattactctattttgtttgtgaaagtcagatttgaggatttagtttataaagaaacccttaattggttggatcccacttgcttcacccaccctgactctcatttcccccaatgtaataaatgtgcatatgtatttagaacatacagagcagtttaacataaagtactgaaattatcctaagaacagattctcagtgcagcaatcctatctttgtgaatttgatgtgttctaaatgcaagagcagaagtgttttaattgtcaggttttaagatattatgaaagcccctagtcacttcagtaagatcatttgattctggttaatgacaagtctatactatgcaggttttttttttttctgtctattgctactgaaatctgcttttcttatatagatcactgttacagatgaggaagttagtaatccatcctttttagatctggtgagaactccccaaatgaggaaatgcacacttattcttatgtttgcttggtaagtttgacttgtgatggatttaaaagcttgcgttaaatttacaatacatcccttccttcaaatcagcttgaagttatctcttacttgttctctggtgtctttcaatgttgctacaggttcacaagcgcagtggtgtatcaaggacttgtcatgcgcctgggaattatagggggcaacctctatatagactttttcatctcgggcgtggtggaactgccaggagctctcttgatcttactaaccattgagcgccttggacgacgcctcccctttgcggcaagcaatatagtggcaggggtggcatgccttgtcactgcgttcttaccagaaggtaatcttaccccacatctgtttggcagccaaaggacttgaaaacacctaaatccacaatcaagtatagggagccacttgttcttaggaaatgtgcaatggaatcacagtctttcgtgatgtcactccattttctgcttaatcagcataaaaacttcgaagtaagagattggttctgtagatgattctcttttctcaattgctaggatcatttatgaatgaaatagatattgtgcccaatctagctgatagcgatgtggtttctgttactcatctttatgtgacttacttttgtgatatctctgatgtttaacttatttcctgaacctctgccatgctgctggcaccatgctaaacgctgaggttacacatagaagaacgcagtcttgacttcgaatggttcacaatctattaagggatacagatactttaatattgtcacgattcttattgtcatgaattatttgtgagatttagaaactaattaaactatttacaagatttagaaatataaaaaaatagattggggaggagtgatcaatccagaaggggattcaagaaaagcttcccagcagtgggaactaaacatgcgtgaagactcaaatgtgccagatatcagggagagagaggacggacgtttccaaactagagaagagtttccagaagtatgaaacacctttgtgcatgcaggaactgagggttcattgctgtgactggaatccagacaaggagcctgagagatgatctgtcaccagcatgaccagccctgcaggtggtcctgtgagcttgcggaggaggaggagtgagtttggcataactgcagcagtttagagatggctatgagcagggggagatgctgagagcaggagttacaattggggcagtcagacctagatgagagagggtcatttcatttcagagatgttgcagagttaaatttttcagagctccatgcctggtagatggggtgcaggccagaaggaagcagagggtgccgtgactcctgatgtgtggtgagcagcacccagaagatccttaccctagaacacaccaggaactgggaggaggagggcttcacatcccaggggatgtgtgaagtagagcaagttcatcattcccctcttccaggaaaggcaaagtggggattacagagaaagctggattctccaggcatcctttgtgtctgcacaaaaaaggctgtctttctttgagaatcctctgaggaccagccaagaaatggacaatatagtgggagtcagaacagtcagacatttacagatgagtttattaattaaatgaaggtttatgaattcttaaaacacgaggtaggccctatttgaataaaattacaggaatgccaatattcggaacacacacacacacacatacacacacacacacacacacacacacaatgtacaagtcccctgacatgttggaatgtttgatgatgaacagcaaccacctatttacatttctcttgttttccttgagtgcattcgcttcccagggctgctgtaataagtaccacaaactcaccggcttgaaacaacagacatttatgctctcaggggtgtggaggctgggagtctagaatcaaggcatccaagggtgcttatgtccagaggttctggggaagggtctcttcatgcctctctctggcaatccttgcagctccttggtgtcactcctatctctgcctccatattcacaggacattctcttctctgcttgtgtcagtgtcaccttgactaattacatctgcaaagaccttatttccaaatgtagtagccttgaggttccaggtagacatgaattttgggagacactgttcaacccactacatggaattaacatattataagagttggaggatctgtacaatagctatctcttaatacgtatctatttagtatcgactaattgccagccactgaactaggaggggaatggagaggtgaacaaaatagacataattcctgccctcaaaattgtataatttaagaagagtgaaaaatcgcaaacattggagacgttactgttctattttactttggtactttggatataacatacaactgtagctccctgagatgaagtcttctgttctcatcgtatgtggactaggaatgaatgaaatattcattgtatatgaaattagaaatgcagcgagaaagatgcatgcttcggtgtgtcccctcatttcatgatatatatatatactttactctataagattttctctggtcctagattgattgggatgactttaatgtttgttgcattcagaatgaccccagaaagcattcaaggctgtgtgtccaaatcaagacagaagtaactagccggatagtcatataactattttgtagagaattctttcatatattggaaaatataacaccaagaacagactgttctcccttgtctaaccagttttattttatagatataatttcctgattgaagctttagaattgttctcagcaagactgaaaatgaattgctcttattctagacacattttatttttaccttctgcagacttggctgcttttatagtcatatgtcagtcatgactgactggcaagaatacatttcaaatccctaaactgagttccaaatattaacagacgatcctcccttgagtccttccaatttaaagacccattggacttgattccagccactggttaattagcacgagaaaggcttttctgctcagccattcctgacgtcagtagtaggtcgccagcccctggggagaatacagatgagcttttggagaaaccagctctaaaatagtctcacagcaaacactttaatcagctttccctccactcgacccaacttttcatggtctaaagaatggaattctggaagaagaaatagtagttctggttgtattctcatctcagactcactgcttctagtccaaatttcttaacactcattaatgtctggaaaataaagacctttctttatccatacctgtctgccatctttaatttgagtttatttaggatgaccacaaacctagcagtttggataagtcgtcttcttgaactggaaaacttgtcttccacttttatttttctttaattgaaaagtgagttcatgtatcttaatttagacatttctactagaatttctcactaaactttatttcagaactcagagtagatgatccattcagaggacatataaagttttgtttaagtcctgcatcctttcttcaggaattgaggtattattcccaatcatctctagtagcttgaccaaatccacattcagaagaaaacattttctttgttctcatgtaattccatggaagacaattttagtttcagtactcatttttaaattgccctgtggtttttgtcattgctaccaaaagatgtctatggccacctcaaaatgaatttagcttattactggaatcaagaatttctttgtgtgtatatatttattcatacttcctacagttttcttttcactctttagttaatgaaccatgcaatgccttagaaacttttctttggttacacatttcaacaaaatctctgttccagtatagtttgatactggactctactgcttggaaaagagttgggagtctttcagattaaggtcaatgttccggacagaccacatctccacaaatggggcaacttggcattttctgaatgttttactgaattgactggctatttatctgagttaaccacatatgtttatcatggtggagtgtgtgtgtgtgttttaatttggtctctggcttttgtttggatttttccatgaaacaccttgcctcggttataaacccaaattgcccttgaatttgtcggtgggactcaattttagagcaatcttgatttagtgaaaagaaacatacaatggaagaacccaacctggatagtgaagctgtttcctaggtagcaggcagccttcactgcagcccgggagtggcaggagatggtcccatcgggctgggacccagggaatctgagtctctgctcccactttccccttccagtaccacatgctcattgaaagatggagtggaatgcattacctagtctccactccccccttttcttggtcttcataaagaagcaaagcctaaataacacatgttgacaaaccttctgctccagagcagacagtggcccagcacatcagcacaaccctggcctcctcactgcctgatataaccgttaacgtgacagctacaagggttctcatgtgggaaaaacatcaagtgcaccaggatgtccttggccagtttgcagtcaaaatatgtaaacttcagactcccagaaatggtttggattcttgagccatcttttccttacacctgtgctcctgggcaattgttttatttaatgaattttagcttttttttttttttttgacttggctattctctagagagaacacacagaagtctactgggcttgattctcttctttcatcctcctcattcatttctactaaaaaattatatattcaggaaggttcaataattcccctaggaaacaggaggactatttagtgctaaatgaacatatgtgttggatataaagggaaaatgaaaggcacatgaacactggacatgcttcgttttgctttggagagcagatatggtcttgttcatgcagacatatgtcctcaataccaaatcccctaggaaaggatgacatcaattgcacaacttctaggaaagctagagcagtgactttttagagtaaaaatggttaactcctctgcccttaaaacataaaagaaagaaaatatttaatatagaatgtttggcatttcccactagttagtagggaggaaaggaaaatttcttcatacaaccagagcagtcctaaaacagttcattttaaaatggacgaaccaattagcattgatgaatgtggctccttctggatggtttattgaaggaagtagtacaatgggggatgaagaagacaatgagtgacatttgccttagtggtaacacacagaatagatgtccccttccaaagatcctggtcctcaaagcttgctccactctagaaaccaaggtcagctcacgtgaggaactccccaggtgtgctgggaacggctattccttgtgtcaccaccgcaaggtatgcacagaaaggacagctgggcaccagctgtgggaacgtggtggctcaaaggcatgactggaaactaccacctggacaaaaagccagtgtgctttggctctctaggaggtcattgcctggaacaatgttccaatgtagtggctgctcatgctcaacaaacggttcttgaattgtacttcctataatccaacctgctcagaaaggcatctagcgctctaaaatattagctatcatctagtttcattgttgttgaaatttggttacattattagaaagttctatcatttgtgcttaaaattggcaaagacttcagactggaggccactaagcaaatactttttgttgttctgtaaaatgttaatgaaatcagacccctaactcctccctttcaaactttctgtgtttgcaggaatagcatggttgaggaccacagtggctacattgggaagactagggataaccatggcctttgaaattgtttatttggtaaattcagaattgtacccaacaacattacggtaattctaacaaacgttatagtttctcctaagtaactctgtagaccagcgttttaagttgatttagttaaaaactatgaagtcgtttccttagctcagtgatatattagcctaggctgaatccagctagtaaagaagatatgctttgagttatcactgctttctgcattgctgcctgctgcattttgtgataaaagtatttctcatattaatatcttcacacactgttacggttttgaggaaaggcccttaacttgaaaccagaagacctctaggtgcccttgcttagactgtgggttaaatctgtatccatcagcatcacctgctgcaagactatggcctctctttgactgcattacatgcattgcagtggtgagcagctggttatgaaggatgaaatgaaacagtgtgcacggattagtgcaaatcaacctcctctgctgaggaagcattccctgggcacacttctccctcagatgaggaaaccaaagtagcacaaagtgacccagagcaggcagggcagtgggttgctgatggataacaccctccacccacgctggagacttcctcactagccttactgtgaaacgtgcagaatggaaatgttttgcttagagttctgagagtagtcgttttcaaagttagaaaatgcaaagtatcttcacacttcctttggttttttaatatgtctgaatatgttgattatcttgaagtcacttgttgaaatagttttcacttaaaattacttttcattcaacagaaatttcggagtttcgctctgttcaggtctgtgtgattttgggggaatcatagccccatttctgctctttcggctagcagccgtgtggctagaactacctctgatcatctttggtaagaactcatttgctattcttaagagccttcatctacattctttgtactaaaagagacctataataattgttaggttcaataatgataatgatagtcatttatcttattataataactatttcattgataattatgatattaatttcatcttattataataactatttcagttttgagagccaattcagttataatgaatggttttaatttactttatattaaagggtgctgataaataatgttcaattagcattctttgggttctgagttaaatgctgtgaaactcttatggtattggagaacataaccaataattttcaggggactaaattaaatattcaatatgtttaaaaatgagggccaggtgcagtggctcacacctgtaagaccaaaatgggaggactgcttgggcctaggagttcaagaccagcttgggcaacatagcaagactgccttgacaaaaatttaaaaattagctaggcgtggtgatccatgggtgcctgtagtccaagctactcaggatgctgaggcaggaggatcaaggctgcagtgagctatggtcacgccattgcactccagcctgggcaacagggtaagaacctatctctaaaataaataaataataaaaaataacaaaaataagcctaatgtctaattgtatttctggtgttctctctctatggatatcatatcttcattggcccgatgctaaaaatccatgtggagggagcaggtgacacaggatcccgggcacacattccatcacctcctccaggtccctcgagtgcacctctcctcctacctccagcttccataggacttgtgaaggaacagaatcatagtctaggagggaccttggggaattcagtgtcccacttctccagggctgctccaacggtcctgcctgggtttcacacacttcccctgtgccctcttctgcagtaaaggatacgggttggcccctttctcacgcaaccgtttctctatctccacttccttacttctggtagagaatgtttttcatttatggttcagcagttgaaatttgaatgaaaatactgagcccatgaggacagaccttctgcttcatgcaaaagtcctttgacagtgtgagggacaaagagtcggcttctaccacttgacaccagtgacctcaatacaggatcacctcaaattattgtatgggatttggtcatcaagctgagtgttaattctgtggtcagcatgaaaaagcagaaagtgctactgtccagcaaagacagagtagtccaggagacaagacacatgaccttcaggactgcagcccacagcccagtggcaggcaggcggggcctgagactgcgaggggagacagccgaatttctaaaaactcagcgacaacagaatgtgataactgctgagaccctgaaagcagaggctcctatgagaataggtcacagggacccttgacccctgagtggaagggagcaggccagggaggaaggaagcaatgtctaggccaagaggggctggctgtgctccaggcagtggaaagttcaaagcaagaggatgccgcatcctcaagcacctggtgctagaggatggagtgcagttgtgagctgggcctgaagagaggtggtgccagggcagggcagggactggatccggaagggcctcaaggacatgccaaggctttgctctttatacacacagcagtggaaagtgactggacagtttcaccctgaggtggacagagctggccttgcattgtagaaacacagatatgcaagtgggttggaaggaccccccagcatcgtccctctgatggtagatatgcaagtgggttggagggacgatgttgggggtgacaattcaaggatgtcatcatcaggagatcacagtggcttcttctaataaagggatggcaatgggaatggagagggtggacagattgagtaaacatcttagaagccagctgggcaagatgggatcactgatgggcacagggagaaagcatggtgacctgagaagcccaggtgcctggggagaagcaggtggcacaggcactgtagcagcaaggctgagggtctgcagggtgatggggctctgtgtccgctgtgcataatttgaggcacctggaagagttcaagtggaaatagaaaccagcaggctcaacaccgctgagctcaggagggaagagtggccttgggatgaagagctggaagccacctggcagtagagaatggttgaagctgagggagtggcccaagccccccagaaaatcaggacaaagcaagaggaaagcaggaggcctaggacagagacctgaggggtggcaaagtgacagacctaggcagaaggagaggaggtggccaaggaagtggaaaccaagtgagaagcccgaggcaggagggcacgagaccaggtccaacctaaggactgaaagtagcacatgtggatctggtggccagcaagaggcagaaggaacctgactggagcagagccagggagaatataggctgagtctggaggagggcaggcagaggcaggacctggagcatggtcctatgctggtgctggcacctcccactcaccagggccaactgctaccatattagttcgtttgccactgctataaataactgcccaagactgggtaatttataaagaaaagaggtttaattgactcacagtttcacatgactggggaagcctcaggaaacttacaatcatggtggaaggggaagcaggcacgtcctacatggtggcaggtaagagaagagcaaggaaaattaccacttataaatccatcagatctcatgggaactcactcactatcacgagaacagcatggggaaacctccccaacaatccagtcacctcccaccaggtccctccctcaacatgtggggattacaattcgagatgagatttgggtggatagacagagccaaaccatatcagctacattttcaagaattttgtaagccagtcatcaagcacagatatcatcaaaaagtaaagaatatgaaatatatgagaaatagaggcaataaatgcccaacactcatcagtccctaattcagctactacaccttcagtattacctgtgctcctgagattgtgtctgctgcatctttatggtggaagccccattgatggggctcctgcatcacttcccagtggcccaggcagggatgttgtgtcagtagcctgaagggcccacagtgggagcatttaaaccatgcacattggcagatgctgccaatcagggcttgattgcccaaagagggttgttaggcatttaccagcacaccactaggctacaaagaagtggagaaaataggggagggtggcttttcaagaagtttggctctaaagagcagaaaaagaaaggatggtaatggaaggatgaggtgagattgagagaaggctggtcaaacaggaaaggtctgaatgtgtttgaaagcttctcccaataggttgaagatactggaggaagggttgatccctacagtgaggagcccaaagagacaggcctaggagaaggctggtcccggagtagacaccaggacaagctttccactgtaaggtaacaggaggaatcggagggagaggggcaggtaagtgagagtgtcagtgagcgggcgcagaggggactcccctccagcacttctgtttccctgtgatgcaggagaggaggccttgggtgttggaccctaagaaggaactcagtcaatcactgtgagatgtgtgagtgaacacatggctgccaggtatacaggggccgtggtgctactcagggtttgaggaagggagagaacctttgaagctgtggtaagggagagctggggcattgatctgggatgcagaggttgctgtggttgagagctactccagtgagcaacatgatggcttcagagtgagcaggccccatgggagagggcccagctgtgtcttcctggagcggtaacacctttcccctattccataggtatcctggcatccatctgtggtggccttgtgatgcttttgcctgaaaccaagggtattgccttgccagagacagtggatgatgtagaaaaacttggcaggtactgtacaaaattcaatgcaccctaaataaaagcaatatttaaaaccacgggggaaagaatgacattgagaaaattgaatatccacagggaaaaaaataagaataaatcctcatctcatattgtaagcaaaaaattcaaagtagatacaaaaggttaacataaaaaaaaccctccagagctagataagagtatgcattgttttttttaatgtggttgtgaagagagaagcattttcacataaggtgctaagactcagaagtgatctaaaggcaggaactgctgatgtgggaaagtggaaattgctgggacatacagcagcaggggattaacagtgtggcttactctacagagtgaggatgcgtcaggtctgtctagatggaatggcataggcaggttttcaagactgactacaaagtgaaatgtcactgaacaacatgttatagtatttataaaaaactaaaaccaaaggtgttttctctctgcagctggataggaagacagatgacacacagatgatagataataggtagatgatagataataggtagatggatgatagatagatataatagatgataatcatagatagataagtgatagtagataaatgataaataatagatgatagatgatagatagatacagatagataaatagacaggtagatgataggtaatgtctggatagataggtggatagataaatagataatagatgatagataataaacattagtaggaagatagagagattgagttttggaggggggtgtttaaatagggtataagtaaaactaatacccagccaatatattaacatgaggagtaatgtcaagaaaaattcacattacacaaattctttctaattgtttgaaattttttcattaaaacatagagatatgaatatgagaatgtatagtacaagatgtaaaatattaatatgtgccctctgtggacacaaatgggctgggaagaggggtagggaagggaggaccatcactttcttgccagagacttccatactgtttgattttctttaaaaattagaacacgtagtcttgtgttgcttgtgtagttttaaaaaatgatgtaacagctaatttaacaactaaaaagcaatcttaataatgacttaggaattaagaacatggagctctaaatatttttaatatataaaaaatcctgaggaacagctttcttccctttgattctattccactgactgccttctgtttacacaatgagagtgatgctttcattctttatccccaaaccaatcaggatcagatttgcaaactcatcaggaaaaaatggaagaaaagggagtcctctgaaatcaagacttttctactgcttcagtaacattaaaaataaacagctaggagaggtttttttgtttttgtttttgtttgtttttggcttggggagtgtgggtggaagggggttgtctaaatggtgtgcaaggaaaatcaatacccaactaacatataaacatgaaggattataccagcaaaaatttaaggtacccagattctttctaatttttttctgtttataatttttcataatgaaaagttgggtacattaattaattatacctagtctctatacatgaaaaaaaatatagtagaagtatggtttacagtgctacaatttaagcacattaattgtgatccatggttatttactctacaaaaattacttagtgctaaattactaaaacttgctagcatttcccttttaaaaatcacactggattattttatcgtttctgctggtttttgttcatgttaacagctcatttccaaatatatgttaattcagtagaagttcataaagaacttaaatgctataatgctaacaaacccctgtatcagaggaaccagcccccaatatttcagcataggttctattttccataagtgttggccagctgagaaataaaaagagtacaaagagaggaattttacagctgggccgctgggggtgacatcacatatcggtaggactgtgatgcccacctgagccttaaagccagcaagtttttattaagggtttcaaaaggggagggggtgtaagaacagggagtaggtacaaagatcacatgcttcaaagggcaaaaaggagaacaaagatcacaaggcaaagggcaaaaacaaacatcacaagacaaagagcaaaagcagaatgactgaaaagggtctatgttcagcggtgcatgtattgtcttgataaacatcttaaacaacagaaaacagggttctagagcagagaactggtctgacctcaaatttaccagggcggggtttcccaatcctagtaagcctgagggtactgcaggaggccagggtgtatttcagtccttatctcaaccgcataaggcagactctcccagtgcgactgtttatagacctccccctaggaacgcattcctttcccagggtcttaattattaatattccttgctaggaaaagacttcagcaatatcttccctacttgcacatccatttataggctctctgcaagaagaaaaatatggctgtattctgcccgatcccacaagcagtcagaccttatggttgtcttctcttgttccctgaaaatcgctgttactctgttctatttcaaggtgcactgatttcatattgttcaaacacacatgttttataatcaatttgtacagttaacacagtagtggtcctgagggacatacatcctcagcttacaaagataacaggattaagagattaaggtaagagatgcataagaaattataaaagtattaattttgggaactgataaatgtccatattaaaatgaaatattcacaatttatgttcagagattgaagtaaagacaggcataagaaattataaaagtattaatttggggaactgataaatgtccatatcaaaatgaaatcttcacaatttatattcctctgctgtggctccagctggtccctccattcagggtccttgacttcctgcaacacccctaaggtctgaacacagacaaaaaatgatcctggagacagatattgttgttaccttagagttgggttttcatgaatgtatttgatcaaaaccagctatactattaaataataacagaacaccctcttctaactagttacataatctttcctaaagactttctcctttgttttttcagtccacattcctgtaaatgtggcaggaataagaaaaccccagtttcccgctctcacctttgaggcccccgacaaagacagaaagaaggagctatccaggagctgatcctccttgcaaagctgtgccttgcagagatgcacgtgtgcatttcagctacatcatgccgcgctgttgtaatactgtataaagacctcaatctatccagagtatttttatataatgttggatgagttaggatttgtaatgctgttgaagtttctgggaacacataatatgtagccagtttaacaaagaagctgtcaggtgcacagcccttcctgggtttttttcttgtgttccctgtggtctctgacccattaggctaaagagagacaagagaagcccccaacctgattctcatgacagctccatcaagaatgtgggatgtgccgaccaaggatttgagaaagttgtacagaaatgtgttcatcaaatctggtcaagggactaagctcctagctgaccattcattctgaagattgcatggaggatgaacatctgggaatcctgttaatgagaaggctgaatcacaggcacctgggccaaagggtgtgagcattcatgttctctgctcaccttggtttccgcacaccttcgcaatgtgaacaggtcaggagtccctcccgtccacctcctctgtaacagctggggttccaggcatggtttaggccctgttccagcaataagaaccaatctgctgtacaatctgaggacttggctctgttatttacaaaatgatgctgtggttctgagattatttgggacatttttggctctcctttagtggacacctagagccacagattcccttctttactaaacaaatcccatggattctgatttctgggtcttaggattttaaaagtgaagggatatttttcttatatttgtgagttcagttccgatggtgcccgtggtcaaaagcgaaaaacatggacaattcctattcattcttagcactttgacatgtcttggggaaaagcttacattttaatttaaaagaaagatcaattatatccatgcttaacaggatcagcaggagctttataaatgactttacagagactaataagggatttgatctttctttttttgttatcgaggcttttgaaatgtggaacttgtgtgttctgctttatatgttatattcaatatcttttcagatgcagtctatattttatgctgagttttaaaaatgaaatactttatgcaaacaggcaaaattggtaccaaagggaaacattaaccatgaggaagagcatttttctaaggagaacaggtgacaatatacacatgtgcgctaatcgtaaaatgagcatcttagtctttaaaacacatcagaattgaatacgaataatctatttgtcgatgaaataaacacaactctttgaggatttgagactacattcaccctttattcacagtcacttgcagttttgcttttctctgcatttctctgctgtaagatgactgttgcattgttgaattgtattttgagtggatatttttgtttggtaacaattaaaattttaaatcgtaaaaaatgtacatttgccctttctcttccttctaaacatgtgtctctcccacaggtcattctcctgtgacacgtgtactgcagagtgtttcaaaaccgggcaggcaattagcaatgggaaataagtggtccaccttcaatatttgcttgttgttcatttacatgctcttggcaccaatcctagactcacgtgtgccccagaataacattcagactctcagctggtcttgtgttacacatccatggaccggttcactccatcatatacagctctctgctccgtgtcccctgggctcaagtcaagcagtcggtgacagatttcattcccaataacagaatcggtttgcatgactccccatacatgttgcagctttgaaaacattcatctcagagttaggtataaagacataaaaatgtgtgtcaagccctcgttagctgatgaggtaaatgcatggacaacttcctaggacttctcggctctgccctctgtgaccttgcagcctgctcaggtctttgtgctctgttccttatcaaaaacagcacaaccccctcaatctgcccatttaaaaattggtggagtgaacaaagagcatgaaaatgttgaagaccacaaccaaaatttactcaaatcaaagttaagtacagagtttatttttaacaaatgtcatagctatgtcaccttactacagaatccagcagtcagaaaataacacaaaaaatgccgaggtttggcgtagctggtagctggggacagtgtcttcgtttgattactgccagttatttccagcatgctaaatccctacccacgttccagcctctaggtgagtcagtgcgtcactctgtctcccgtccaattaattatttctcatcactccctcaatccaagtaacaaaccttgaaacacgaacatagacaccaggcttattggggcgtgcacagccaagaccccaagaagtgactccttgtaaaatgtatttgtccttctcaaagcaaaccagaggccctccactgtcaccctaaatagaggtagggaaaaattcatgtgagggttaggctgccagccttttattgtggcatccatctattgtccatatgtatattttcccagtaattgaaattggaaaggaacttatgggcatattactggagcatctgcagtgcttaagtacttagcaaaatctattcagcgaaaccacaccacttagtttctcccaggggtaaaaaaaacccttgtgaatcctgcacacatcccttcctgtgttggtgtttcctttagactggcctagcctgggcatcactgtaaagtatgtgcagttggtctctgtcctgtaccctctacctccttccctgtcggaaaagtcaccactttagtccctggccaccagcacaccccaggagggtgagtggcctgaggtagttacggcacttaaaactcccttgctaccgatctggaactcaagccccaagacatccccttagatgatctgaatacgcattcagggacagatctaggcagtttctaaacaacacttagactggggtctaacgttgacaaatccttctagaatttgcctctttgggactgaagtctaaggggctgagaccaagaagggagagcacaagactaactttggtctcttgaccttttcttaccttgcaactgtcagtgcctccagccaaatgcctagcacagagctcagtggatttgattcttccattcagatactcatagcgattgcacactttattctcaatcacaagaagctggggcttccttgagaaggccagccccaaaggtacctgtgtttaaaagatgaaagaaatggttgctgaacccaaaacatgtttaggaggaaaaccagaagaacagagcagtggcactggacctcctgtctgtccgtgaggctgcagaacacaaggcagctcccaatgccgctggactctctgaccttggagagtgtaaacatcatatatgattctgtgttcctgagatctgggtttaacgatctgggctttgtcatggtgttttacgttcgttgttgtttgtgtactttttgcttttcttttgaaagtatgaaaatgatttttacaatgtaaagagagtctgagaaatgcaattgctattctttttatatactttttcagattttttatatgcttctttactacttacatcataatgcacaattttatatactgattttttcaatcaatgtatatcatgagtttttaaaataatgctacaatcttcataactaatattttaatggggagtgactgcttaattggcatgaggtttccttttgagatgaggaaaatgttctgaaaatatggtgatggttgcacaccattgtgaatgtactgaatgccattcagtggtaccctgcaaaataattaaaatcctaactctta

SEQ ID NO: 306 - DNA, 20649 bp, Homo sapiens
cgggccgggggtcgcctcccgcctcccgcctcccgcctcccgccgcccgccgcccgcgtcgccctcgccgccgttgggccgcgccgcgccgccatgtcgggccccggaccgcgggagccgccgccggaggcaggcgcggcaggcggcgaggcggccgtcgagggcgcgggcggcggggacgcggcgctgggcgagccggggctgagcttcacgaccaccgacctgagcctggtggagatgacggaggtggagtacacgcagctgcagcacatcctctgctcgcacatggaggcggcggctgacggcgagctcgagacgcgcctcaactcggcgctgctggcggcggcgggcccgggcgcaggcgcgggcggcttcgcggcgggcggtcaggggggcgcggcgcccgtgtaccccgtgctgtgcccgtccgcgctggcggccgacgcgccctgcctgggccacatcgacttccaggagctgcgcatgatgctgctaagcgaggcgggcgcggcggagaagacgtcgggcggcggggacggagcgagggcccgggccgacggcgccgccaaggagggcgcgggcgcggctgcggctgcggctggacccgacggcgcgcccgaggcccgggccaagccggccgtgcgcgtccgcctggaggaccgcttcaacagcatccccgccgagccgccgcccgcgccgcgcggccccgagccccccgagccgggcggggcgctcaacaagtgcgtgcccggcggccgggggctggcggggcccgggtggaggccgaggccggggccggggccggggcggaggcaaagggggccctcgctgtgcacgcccccagcctgccctcccggcggcacagggcgcggacctcaccgggtctggggccgccccgaaaggctgtgtgcgctgtgcgggccccggggagcaggtacttccagaaactaaacaccccctccctcagtggccccgcctggagtggggccgagcgcgcagaattcctgggaaccatgtgctccgggtggcactcttggatgtcagggaagcctaggaaggcccgacgggggtttgcaggctttgagctctaaaatgaggctccagcctgcagccgcccccttggcgaccctcagggatggctgtggaaggggctgcgtccgcagttttctgctcatcccagcctgtagttgcccatcgtggtcacactggaggatggcaaaagtgagattggtgtcaggatgtgatgagagcagggaggtggcgcagttttgcttttcctccataggaagaggaggacttccacagcagcgatagttgctaattgttgtgtagagatttccaggatgagagttgggttgctgtctggaaaaactagccagagccatgggagtgggatggtggatgcttgtctgccacgtattgctgacacttctgggctttcttttgtcttggcagtttggtaactctcattcgacatccatctgaactaatgaatgttcctcttcagcaacaaaacaaatgtacagcattagtgaaaaataaaactgcggctacaactactgctttgcaatttacatacccactgtttactacaaatgcttgctctactagtggaaattctaatctttcacagacacaggtagggaacatgatttgtgaagctttgctcttttgtattaaatgggtaaattttaacttattttggttaggtcccaagtacttttttttcccttcagtgagcttaataaccttttaagccgggcgccaaggccgacacctgtaatcccagcactttgggaggccgaggtgggtgggtcatttgagttcaggagttcaagactagcctggccaacatggtgaaaccccgtacgaaaattaaccaggtggtagtggcggacacctgtaatcccagctgctcaggaggctgaggcgggagaatcgcttgagcctgggaggtggaggttgtggtgggctgacatcgcgaccctgcactccagtctgggcgacagagtgagagcctgtctcaaaaaaaaaaacaaaaaaacaaaaacaaaaaaatacctgtgaaagttgagtgtttatgtggtatgcgaatatttttaaatcttcagtgcaactaaagttcttcaaattacgtgttagtagttttgatgtttgttaagtgcatttcatttgtgcagtaaagaggagagtaagccacatattgataaaattcctgttgcttcatttttttccagagttctagtaactcatgttctgtacttgaagctgccaagcaccaggatattggattgcctagagcattttctttctgttatcagcaagaaattgaatccactaaacagacgttaggtagtagaaacaaagttttgcctgagcaagtttggattaaagtgggaggtaagcgatgaagcagcaggtagtgggagctttcttctgactgagccctgtggctgatggcattttggccttggggggcaggggagacagatggtttgtacacatgtgaaacagtcttggaggtgtctgtgtatctcaggggtctgtccacccgcttccctgtcttttcgctttaaacattattctgattctcaaacataattaatcttggtgtgagaacgttgcgtttgagggctttttcttaacagtaaagtgatagacttacataaattttcagttattttcaagttactgaaagtactttatagttttttattttccttatgttatactcgatgagtgaggcagtcatctaacatctgccgaaagcctttggataggtggctgctaataggaggaccctattagggctgccagggagaggctgtaaggtgattcggaaagtttggaaataaagtcactgctgaaggcactgctgcgctaacctgcatagtcccttcctccctgggaaacacctgcgtagccccttcctccctgggaaacacctgcgtagccccttcctccctgggaaacacctgcgtagccccttcctccctgggaaacacctgcgtagccccttcctccctgggaaacacctgcgtagccccttcctccctgggaaacacctgcgtagccccttcctccctgggaaacacctgcatagccccttcctccctgggaaacacctgcgtagccccttcctccctgggaaactgatttgtgaagtgacccgaaaaaagaacactccttacacttagctttccaagagttggtgaagacaagatggggaggaagagctaccgccttctcccatgtcagtccttccttttcctccctataaaattttatgccaaagtatatgttcacatttgtaagatacaaagatgagtattaaagcagcctctgtgccgactactcaggttaaggaataaaatatcaccaaaacgaccgaattcctctctctcctgctgaaagcttcatcatccttctgaaatgggtgctttgtgtggcatacgcgtgcacatgagcacgcctgccagtcacgtgcctgtggtcctttgatggatacagttccactgacgcacacgtggcatagcctgtcacgcagcagaaaagctcggacgctacttcttcctgctttggggaggagagccacttctgcggcgagggcacacacacacgctgctgcagttttgttctgagcattgcagtaaaaatactgtcatattagaataattgtttttttttcttgttcttagaataattgtatataaagaaaatatttttgggaggaaatatgtccaggtggtttgttgttgttgtttttttttttccattctgacctttagaaaaagtaaacaacttcttgttttctgtattcatagataacacctgttaattaaaaagaggggctttggatgaggtcatattggttgcatagcacttggaaaacgtatttagtgtgatgattgattcttgttcagtttcgttgtataaaataggcttgggcttcatggtccctgctgatgctgaaaaactgcattagtacatctctttgtgtttcggttctctgtgctgcttacccaataatgtttatatcttggattgaaaaggccaaaactgtattcagcattaattgagataagaatacaaaattaaaaaccacttttttcttctttcgcaaagaagcagcgctatgcaaacaagcactgaagaggaatcggagtagaatgcgtcagttggacacaaatgtagagcgaagagcccttggagagattcagaatgtgggcgaaggtgccaccgccacacaaggcgcttggcagtcctcggagtcctcacaggcaaacctgggggagcaggcccagagtgggccccagggaggaaggtctcaacgtagggagaggcataaccgaatggaaagagatagaaggtaatacgtgtgactgcttgtcaggctgactcatatatgattaccttagtcatacatggttatcacagatgagtgatccttagccgtttctgcgttcagagggaataaagcaggtaggagcatcgttagctttcccagatggatcaaggatcccccagactatgcccaggctcgctggctcactaggaggactcccgggactccgcatgcagtcactctcaggctgtgacttactatggagaaaggatgccaggtgcgatcagcaaaggcgcgtggggagaaggcaggagctgaggtgcaagcttctaagagcgcgccctgtggagtcaggcaggttgcccctcatgcccccagccatgtggtctgaaaacgtgggtgaggtgttgccaaccaggaaagctcgctagagaccaggggcgtgtcacgtaggcactgcccccatgcatgcaaccacagtccagtctcccagaaggaaagcagttgttcagtgtcagccatatcgtttgcacagtgtaggttctgggggcactcttaactccctgaatctaggtttgcagactccactaagggccagccctgactgcaggcctttctgaggagagtggtcaggctgttttggtaactgctgcttaccagccagcttgagttcagcaagttttgcctggttctttttttttttttttttttttgagacggagtcttgctctgtcgcccaggctggagtgcagtggcgcgatctctgctcactggaagctccgcctcccgggttcatgccgttctcctgcctcagcctcctgagtagctgggactacaggcgcctgccaccacacctggctaatttttttgtattttttagtagagacggggtttcagcatgttagccaggatggtcttgatctcctgacctcgtgatctgcccgcctcggcctcccaaagtgctgggattacaggtgtgagccaccgctcctggctattgcctggttcttttaagattgctgggaaggaagaggttaaaattgttatttaagtggttttgtctgtagattttatttgtggtatccttctttgtagaattaagagtggttaatttttttctattataattgggttttcttttctttttcttttttttttttttttttgagacggagtcttgctttgtcacccaggctggaatagtgcagtggcatgatctcggctcactgcaacctccgcctcccaggttcaagcgagtcttctgcctcagcctccccagtagctgggattacaggtacccgccactacgcccagctaattcttgtaccttttagtagagatgaggtttcaccatattggccaggttggtctcgaactcctgaccttgtgatccgcctgcctcggcctcctaaagtgctgggattacaggcatgagccaccacacccggcctataattgggttttcatagaatatttccctaatctataattaattaactacataatgtatcgagtactggtactgtgtaccagtttctgctttaagttcaggaaataaataacagtgagtgagacaaatactcaggtttgaagctccaaggttgaatgttgagctaaggcaatttatttatttatttatttttttatttggtgagatggagatttactcttgttgcccaggctggagtgcaatggcacgatctcggttcaacgcaaccttcgcctcccaggttcaagcgattctcctgcctcagcctcctgagtagctgggattacaggcatgcgtcaccacgcccagctaattttgtatttttagtacaggaggggtttctccatgttggtcaggctggtctcgaactcctcacctcaggtgatccacgtgcctcggcctcccaaagtactgggattacaggcttgagccactgcgcctggcatggcaatttcttttaaagggatctattcaaacttgctggggcagggtgcagtggctcatgactgtgggccgaggtgggaggattgcttgagcccaggagtttgaaaccagcctgggcaacatagcaagtccccgtctctaaagaaaaaccaacaatactagtagtggtggtgttgcacacctgtcgccccagctacttgggaggctgaggtgtgggaggatcacttgagcctgggaggtcagcgctgtagtcagctgtgatcatgccactgcactccagcctgggccacaaagtgagacccatcccccaaagaaagaaaattaaaaagctagctaatatctttttatgatacttttatacacatggactaactgagggccttcctcaccctactgtgaattatgaagggcattttgctccgacatttatttaatagacatttattgagtacctgctatgtggaaagccttacaccgtacgttgacagtttgaaagttggacttctagctctactgcgtagacttgtggttagagttcagtgagctgatgtgtaaagagtgtttcgctcaatgtctagaagtccaaaagcacctagtaaatgccagctgctgttttactggcaaagtctctaattaaagttctaaatagacgggtgtgaaggtgagtaacaagggccatattgaataagttgctcagtatctgcttgtttaggactttgcatgttactgaatgtaatatgtaaaagtttaaaaaatagtctaataacaagactccaattgtttatctctacaaagaccaagtttcagaatattaacagagtgttgggccgtgatcctttctgaatcagggccccttggagaaagctgtgcacgagttcctggtagggtatttagcccgtgaagggcaagtaatatcagtcttgaatgacagagttatctgcccaatttggacccctcagtggtccaaatggaagaaggtgtcagacacaaaatgttgcttccagtttcaggggctttggagccatccctaatctagagacttgaacctggcccgtgagaagtaaagagggaaagctccagggagcttgtgggtcatggggccgccaagggcacccgaggatgctctggcctctggaaggcagtggctgcctctgtagacaaggccgtggcaaagccgtggggcttcctgtggtgacaggcgcttccgtggcactcagtggccaggatgcacgagctctggttccctcaagtactacaggagacgcttccttttacatgtttgttttgctccggtctctctcggtgatgactttgggttttgactataggcgcagaatccgcatttgctgtgatgagttgaatctcttagtgccgttctgcaatgccgagactgacaaggccacaactctgcagtggaccacagcattcctgaaatacatccaggaaagacatggagattctcttaaaaaggttagtggtaggccaggtagattttcagaattttacaaattttacttaacaatgtccctcctttttcctaaggataactcaaactatcctttgtttcctggaatctaacatcaaatactaagtccagtatgagcaaagctctgctctttaatgatataacttgtcatttattaaagtaatagtcacagcctacatgtgttacactcagtgtgtaaataactgtgaagaggcaattgtcagatagcaaattgggcacctgctgtgtacggtatattgcactggggctgacgggtgtgtaggacatgatatttgccctcagaaaaacttgtgaaagggataaaagcaagaatagaaaaacaaaaaccggccagccacagtggttcacgtctgtaatcccagcactttgggaggctgaagtgggaggatctcttgagcccaggagtttgagaccagcctgggcaacatggcaagaccccatctctactaaaaaatacaaaaattaacctggtgtggtggcgtatgcctgtagtcccagctgctcggggcgggggctgggagggaggatcaattgagccagggaggtcgaggctgcagtgagctgagatcataccactgcactccagcctgggcaacagggcaagaccctgccccacccccacccaccccaaaaaagaaagagaaacaaaaatgcagataagtgtcaaatagtctgatctggacttcaaatatgcccagcaggttaataagaaatatacttctgtggactgggtgcatatacttctgtggactgggtgcatatacttctgtggactgggtgactatacttctgtggactgggtgactatacttttgtggactgggtgactatactgtggaccgggtgactgtacttctgtggaccgggtgactatgcttctgtggaccggtgactgtgcttctgcggaccgggtgactgtacttctgtggaccgggtgactatgcttctgtggaccgggtgactatacttctgcggactgggtgaatgtacttcagccgaccgggtgaccatgcttctgcggactaggtgactatacttctgcggactgggtgaatatacttctgctgactgggtgaatgtacttctgcagactgggtgactatacttccatggactgggtgaacatacttttgtggactggttgactatacctttgtggactcggtgaatatacttctgcggaccgggtgaccgtgcttctgtggaatgggtgaatatacttctgcggaccaggtgactatgcttctgtcaaccaggtgaatatacttctgtggaccgggtgactgtacttctgtggaccgggtgaatatacttctgtggaccgggtgaatatacttctgtggactgggtgactagggaggagccggcgtgttagcgccagcatatgcagtccctcaggacagccagcctgccgtgatcctgtctgtgtggtcgtggcagtggcctgcagcaagccatcgtggttggctggaactagacgtgtgatttgaatgcaggagttcagtcagcccctcagtggcctaaaaggaagaaggtgtcagtcacagggctggttctgggccctgccttggggggaccccagttccagggttctgggccctgccttcaggggacccgagttccagggtcctgggccctgcctttgggggacccgagttccaggtcccggcctcagcgttgcagtggccagggtcagtggctctttggccctctaggagtgagcagaccttagtgaaatagatccacagggtcctgactttgtacctggtccaagctgttggggaattgctgctgttgacccaggcaggagtctgactagagaacaaactaaggttgctgcaacaaacaaggacctcttccaagaagggctcccaggcctggcgcagtgactcatgcctgtgatcccagcacttgggaggccgaggcgggtggatcatttgaggccaggagttcgagaccagcttggccaacatgatgagacccccgtctctattaaaaatacaaaaattagccaggcgtggtggcgcctgtagtcccagctactcaggaggttgaagcaggagaattgttgaacccgggaggcggaggttgcaatgagccaagatagcaccactgcactgcagcctgggtgacagagcgagactccatctcaaaagaagggctcctgtgtctacgtcatggtggggctagagagaggtccccgcagctgggctgtgttgagtgagggctcgtctcttcagcgccaggcaatagtttgtcttgtctctgtcccttttctgtgtccacatgacatttacatcttgcgagttgcataatttaagttgtttatttacattatacatttaattgcattctatagcgatgctatgttgaatgtattctgatcggatcgtttatggttatttacaatgcagttactcttgaagattattgttagaggtagactgttgatttgttttgataaaataaagcttttgtgttttaaaaaatgctttaatgttttggctttgtgtatctattagtaaatcattattgatctgatttactcaagacgaaggcatttataatttttgaaattaaaaaatgttaattgtatgtatagtcaaagattaagtagaccaaatgtttatggatatgatactttacatacattatgtttgctgaatatttcttaaatgtaattacattgaatctgattacttctgggtcacattattagacccaccaagaaacaggctgaggtcaagtcagttcacaattttttcggggaattagaacataaaaagccgaaacacatgggttcttaattgtttctttagtgactgcccccttttacttggatgcatatttttgtccttgaagacgtaatacatgagagttttaagtgatttctctacattattttggtacacatttcactcagcaggtcttttccagtgtgaccaggcactgctgaaggtgctggggtaccctgcgcaagatagaggcatgtctggcatggagggaggcaggggacgagtaaacgtgaagacagtgggagcagggccttgcgggtggaaggtgctgctgcgagccagccggactcgggggctgctttggattgggtgatgttgggtggtcgagggaggcgcccaaccaaggcccaatgatgacagggagctggcagccaggacctgccggctgcagagtctgaggagtgcctgcctgccagccagtgttgctgggcagggcaccggggcaggctggggcctggtggaccgctagtcctgagggttgggggcctcggcagtctttgggcagtgagtgacatgacccatatcaccctgctgctgggggacactggatgctagggagtaggagctgggctggggtgagagtggaaaccaggagtctgcagtagctggaagatgtggcttgccgggcgatggctgccagggggcggcgctggggaggaggaaaggcacaaggcttcttgtgtttgtggcggtaccagttgggggttgtgatgggaaaaaggcgtcagggtttggcctcggtggctgggtggatggggctgtttactgagagggaagactcagagaagcaggatctcggcattctgggggcgtcaggtggggacatcgggaggcaggggatagataagtatggggtgagggcagggcggcgtcagccatcagtgattcacttctgttcgttttctagtgaacataggaattacagtgaacacctgtacacccatgcttcagtctcagcaatgaacatttaccgtatttactttgtacacacgcacaatttcaaagacaattatagacacgaaccttcatctctaaatatttctacataaatctccaagacaggccttccacagaatcccagtgccatgatcatgcctccccaagataataagtctttttcatatcctctaatgcacagactattcagatttgcccaaaatgttcttttattgccactatacctgcctaatttttttattttaatgtttattttgttttgttttatttttttgagacagggtcttgctgtctcccaggctggagtgcagtaacatgattatggctcactgcagcctctgcctcctgggctcaagcaatcctcttgcctcagcctcctaagtagctaggacttcaggtgtgtgccatcatgaccagctaattttatttttgtagggatggggttttgccatgtttcacaggctggtctcatacttctgggctcaagtgatcctcctgcctcagccttccaaagtgctgggattacaagcatgagccaccatgcctgactagttttttaatttttgtagcaatagggtcttgctatgttgcccaggctggcctcccaaagtgctgggattacaggcatgaaccaccacacccagccaaaatgttctaaaaatgactttcatagctgtttttttccacagtccagcacccagccatggattatgcactgcatttgatgacagttttcaagctctttgagctacaagaatcccccccacagttattaactatggcattgaggctttgaagagatcaggccggttgtctagagaatgccccacattctgggtttagatggctctatttactgttggtaattttaaattttggtgtaatttcaaacttacagaaaaattgcaagaacagtacaaagagctctttgtaggcctgtccgggtttgctccattctccctgccggtcccagtttctctccaggtatctttgggatccatttgatagtaagctgcagacaccatgcttctttatacttaaatacttccgtgttttttttttgagacggcgtctcgctctgttgcccaggctgaagtgtagtggtgtcatcttagctcactgcaacctctgcctcccaggttcaggcaattctgcctcagcctcttgagtagctaggactacaggcatggcccaccatgcccggctaatttttgtatttttagtagagaccaggtttcaccatgttggccaggctggtctcaaactcttgacctcaagtgatcctgcctacctcagcctcccaaagtgctgggattaccattgagccaccacacccagctaatttttgtatttaatagagacagggtttcaccatgttggccaggctgattttgaactcctgaccttgtgatccgcctgtctcagcctcccaaagtgctgggattacaggcctgagccaccacacccggcccagtgtttactttttttgagacggagtctcgctcttgtcacccagtctggagtgcaatggcgtgatcccggctgactgcaacctccgcctcctggattcaagcgattctcctgcctcagcctcccgagtagctgggattacaaacgcatcccaccacgcccggctaatttttgtatttttagtagagacagtgtttcgccatgttggccaggctggtctcgatcttacctcaggtgatcctcccgcctcggcctctgaaagtgctggcattacaggcttgagccactgtgcccggcccccgtgttgactttttaatatccacaacgatgaaaatcaggacatttaacattggtgcaagactgttattcacattttgcctgctgtctcaatagtgcccactacaactttttccccagtcgggatggcgtctggggcgctggttgtgtttagttgtgagatgcccctgcacgctgggggccctgaaggtgccagccactcctggggcctcccttgtggtgtctgtccctcccttcttcacaccagcaggtggttgagtcccgcttcgcatctccctgccatctgcatcaggccccggtgtcgctgtccctcacgtgctgtctgttgtcaggccctgctgcagactcggactggcctgtcccttctctcctcctttcctgcggacacgctgtgacttctcccgtgatccttctgtgagaactccctggacctcgtgtcctgtactggcaaccgcccatttctctgctctccttggctgcccggctgcccggcgcttgtctgtacctcctgagccacttcatcctctcttggatccattcccagcagcctgtgatcatggcctcccatgccgtttggtcacgccaccacgcccagctaatttttgtatttttagtagagatggagttttgccatattggccaggctggtctcgaactcctgacctcaggtgatccgcccgcctcggcctcccacagtgctgggattaccaacgtgagccaccgcgcctggcctacatacggattttcattctgtttttgaacatggccactggagggcctctcggctgcagagcaagcgtttgtagcttgttcgtggcagaatgagccgaacgctgtgttgtgacctgttttaaaaataaagcatcttgaaaaagaaaagccattctttttgtcctaatgagtttatgcctccttacctctggccacctgagctccttggtctgctgtacccctctggcctgggccgtgctggagtctttctggggctcagtcattcactttgttggttttttatgtggggtcagtggtagtgctttttccatcataatttgctcttatctttattatcccaaaaccttatttctattatttccttcttgaagttttatttttttctggtatcttgggttgaaagtttattttgtctatgttgttttctaatcaatgcattatagtaaatttgtcctggtgtgcttttgaaacatttcacaggttaggacacaatgctttcattgtttctcagttttaaatagcttgtaattttttttttttttttttgagatgaagtttcactcgttgcccaggctgccgtgtaatggcgcgatcttggctcactacagcgtctgcctcctgggttcaagcaattctcctgcctcagcctcctgagtagctgggattacaggcatgtgccaccaccccggcaaattttgtatttttattagagatggggtttctccatgttggtgaggctggtcgtgaactcccgacctcaggtgatccacccacctcggcctcccaaagtgctgcgattacaggtgtgagccactgcacccggccgctttcttcctcttaataacttcctggtatattttcctgactcatagttagagctatttcttttttcttactaagaaaattttttttattgttggtattattatttttctttttctttctctctttttttttttttcccagcgaggggccctcattctgtcacccaggctggagtgcggtgcaaccacagcttagtgcagcctcgtcctcttgggctcaggtgctcctcctgcctcagcctcccgagtagctaggaccgtaggcgcccctcaccaccgcacccgtcttgttgttattcttctcatgttcacaaatctaacatgagtatctgctttgggacgttgtcatctcaatgttttgatgttataaaaattcctttaaaactcaacgatttcacatatgttctgttgcaaatagatgcatttggattgaggtgcagattgagagtgcgatgacatcagtaccacgtctttggcctgggctcagctgaggaggactaaggggatctgctcctctctttcacagctgccccagctcccaggagacgggtcgtgggcgggccctgcaagggtccagatggaaccacaactcaaccctgcctctgcccaactgttcatagtgaaggcagacgccgggactagcctcatcactgtgtgaaaatagttcagaagatcttgcgagcgcctagttatgtctgaggatgattattttcttccttccttctttttttttaaattatcgtcttttaaatttagatggataattaagaatgcttccaatttaaggttctaagcacaaactccagatacgtcatgttatggacttgcttcctgaagatgaaatcagcagttgatggaaagaatccacaacacgcctacagaacagcaaatcacaaatggctgtgtctccacgaagccaggagctttgcatttgaagtttctatctgggctcatttccagctgttcagggttcggattcctgaaggcttccttagcatttaactcattctttgttgactgaaggcactggcactgtttctccacacgcaaactgatctttgtcataaatcacttttataatgagagagcagcctggacacattgccacaccttccccattctccagctcttccttggtgatggagaagttatctccgcatgggcagggacagaaatatgtctccgagtcctcgtcatattggaagtcctcgatttccacctcgtcatgaaatactgccatggtcagcgggggttgctgaaggggtgacgccccagcagtccgagaccagctccgagggtctaacttctccggagccggcccaggctctgactttcatttaattgtcctgaaaggtgaattctatcttgccaaataggcaagtgttttttatatgtaggctttaggtgtcagaatataggaaattatcaaaatgtggggtcattttaaattgcatcctaaaaccttttaaaatttgggaagaagctgggcgtcgtagctcacgcctgtaatcccagcactttgggaagctgaggtgggcagattacctgaggtcaggagttcgagaccagcctggccaatacggtgtgacccccgtctctactaaaaatacaaaaattagccgggcgtggtggtacatgcctgtaatcccagctactcaggaggctgaggtgggagaatcagttgaacccaggaggcaaaggttgcagtgagctgagatcgtgccattgcaccccagtctgggcgacaagagtgaaactccatatccaaaaaaaaaaaaaattgggaagaaaatgagtatatttatatgcaggtgtagattctgagtgcacacagtagttggaaatggcagcttgcttggttggaaagttgcttaaaagtggatgggtggaatgttccagtcactccaggtggttcagaagttaaatccatggcagcatggcgcttgtgtcctcctggacttgaattaagtagaaagttactacaactcagcaacaaaaagactacacagactgggaaccgtggctcccgcctgtaatcccagcactctgggaggccgaggtgggtggatcacctgaggtcaggagtttgagaccagcctggccaacatggtgaaaccctgtctctactaaaaaaacaaaaattagccgggtgtggtggcaggtgcctgtaatcccagctattcaggaggctgaggcaggaaaattgcttgaaccccaggaggcagaggttgcagggaggtggaggttgcagtgagctgagatcacgctgttgcactccagcctgggtgacagagtgagactcggtctcaaaaaaaaaaaaacaaaaaacaaacaaaaaaaaacagaaaaaaaatgttgaaagccaggcgtgatggtgtgcacctgtagtcccagctactcgggaggctgagcctgcagtgagccgtggatgtgccactgcattccagcctgagagagcaagaccctgtccaaaaaaaagacagcacaactgaaaaatgggcaaagaacttgaatagacatttctccagagaagatacacagatggccaataagcccatgaaagatgcgccaagccgttagtcattagggaaatacgaatcaagacccaatgagatactacttttacacatactaggatggctattcaaaaacaaaaacaaaagcaaaatagcaagtgttggcaaggatgtggagacatcagaatccctgtgctttgccgctgggggtgtgaaatggtgcagccactgtggaagacagtatgacagctcctcagaaggttcaacatagaatcaccagagaagcataaaccccaaagaggtgaaacagggacccaaatggatgcttttctatgaatattcatggcagcacctttcacagtggccaaaaggtggaaatgactcaagtgtgctccagcagaggaatgagtaaacaaatgtgttacaagcacacaacagaatcttactcagccatgaaaaggaatgaaattctgacacaggctacagcatggatggcccgaggtcattatgctgagtgaaataagccagtcacaacagggcacaccctgcgggattccgtaaacaaggcacctagagccgtcagattcagagagacagaaagtggactggtacgtgccaggggctgggggccggagcggtgtggagttagtgtttaatgggtacggagtttctgtttagggtgatgaaaaggtggtggcggctgcacagcactgtgagtggacttcacgctgctccactgtacacttacacatgcttaaaaggcaaattttatgctatattttaataccacaataaaaactgtataaacctggatttaatcgtgtagaatgctatgttttaaaaccaacttatggaaattttcaaatctgcacagaaatagaaagtgaactcccaggtccctctaactcagtttcaggcatcagcttgtttcacctatcccctcgccctcccacccccgctgaattattttaaaacaattccagacatcatttcattcataaatatatcttccgaaagaaaaggcctgtttaaaaacacaaccgcattatcagtctccttcctgaaagccttcactccttattacccacctgagtctccttcccgaatctgagcagaatctcccgtgagcccacaggtgtctctacggtcagctcatttgaatcaggatccaaacatcacatttggttgatagtttttaaatatatcttaacccgtaatagttcccccttcctttcttcctcaccgttcatttgttgaaaagggaatgatttgtcccgtagacgtttccacattctgcccgtggtggttggcgcctgtcatcgggccgtcgcctgtgcccctctcttcctctcagtctccttcgggaggttgagactgaccccaccattataattgaggccttttgtaaaagacaggtggtgtgacaggagcaagctcagcccacccccaccctgctggcagggtctccccaaggacagagccatctcagcgagcagcacctccaccttgctggccttggaaccctgagtgtgtggcagtgcagagggcaaggcagtcgccctggggtgggggtagatgcccctgacttgttaattgttgaaactttttaaaaatttatttttttgagacggagtttcactcttgttgcccagactggagtgcaatggcatgatctcggctcactgcaacctccacctcccaggctcaagagattgtcctgcctcagcctcccaagtagctggggtcacaagatgcttgccaccacgcccagctaatttttgtatttttagtagagatggggtttcaccatgttaatcaggctggtcctgaactcctgacgtcaggtgatccacccacctcggcctcccaaagtgctgggattataggcgtgagccgccacgcccggcctgaaacgttttaatatatacactctaccttctctcacacgctgggtttacaggtttattagctagggcccattagcggttgaaacgttcatgtcatgtatattttaccacaataaaatcaatacagtgtggccagacattctgagtattggaaaaacaaaagtacatgtacagtgtaactgctatttgaaaaaaaaaaagttaaaatctgtttattatataaatccccttgtgaggtaagacacaagtttgtgaatgacaccttaaaacagcgtattctaaagtcatttacttagctcttaatttgaaccttttgcactttggaagacagcagttttcatgtcagttaattcagtatgttaaccgtcacttcttcactgcaggaatttgagagcgtattttgcggtaaaactggccgaaggctaaagctgaccagaccggactccttggtgacctgtcctgcacaggggagtttacagagcagcccctcgatggagatcaagtgatcggactgaacaggaatcctcggggggtgaacagccattccttcgtgacctgtgcacgccttctgcaaccctggagctctgctcggctagtctgactcgaaaagggcgtgactcaagctgacgggactccagtagggactttgagagcacattttgtaaaaatatttatctagacgcaaatgcttatccatgaatgtcctcttagaccatttggggatgaagccatcttaataattagtaataattaattagtaataattagtaagcattttctcaatgctctgattccatcatgttttcttaacatgataacttaaaaaattgacatcctttgtactttctttaatcttaaaaagtacacggctttttacttatttaccttttaaatatgcccctttagcaattggaacaagttaaattgttaactaaaaacagtttggaaattttatttcattcgttatatcacacccccttgtcatgactctgagtcacgtgctgctgtattgcaacgtgcaggaccattttaaacctgtgtgctaaaaattttccagatacttgctttaaagctacttttgtccacaaatgaaatactgtcacagtagacgcttaaatgccacgttttcataccaagagtcattcattacttcatgtgtcacaaactgtggtgtttggaattgggtttttcaatgagtggctttacttatcaatcacaacaggtaatagcaatagacgttagtgcaatacaaagtcaccctcaataaatactgttaattggagatgtgagtttgtacacaaaacatcagactagacctttgtatgggagagaatttactgtacattaaattctttattttttgtta

SEQ ID NO: 307 - DNA, 201767 bp, Homo sapiens
agaggcgcttaagttaccaagggattagggctgatctcaggagaggtaaacgaccatccttggaacacggagcccttcttccctgcccggtatctgcgcgtgccttgggtagtccgcacaaccctccccagctccggatgccctgggatacccggacccaggagagagcgcgtcagcggggcgcagctactttgcactcgccgattctgacacaacagatagttaattggggccttcgaaatcaaggactaaggtgagcagaggagtcccccagcccctggctgtagcctttgggacttctctcccgcgtcttgggtcagagcagcgtccgcagcaaagtcctttggggtgaaagacccgggtgcgaattagtttcaaagtgggaggttgcttacacgtgagcggggtcgccagctctttgaagggcgcacggtgcggaggctccggcaagggtgcaattcccgtgcgcgtgttagcgcaatgcgcactccgctgggcccaagcagtcatcagttctgccaagtgggtgctgctccgggtacccactggtgtggtgggtaagtcgggagcagaataatgaagcgcattacctgggaagccaaatttgcaaagcttaacccaatcctcctcgggggcacttcttgtagaataagctgttggtgtatagcagccatacatttaacaaatatatgggcataaaaaatgatagaaaataatagggtgaaggtttgacccgccaccaggcttcttgccctcgcctcttccgcaggccgagggcagttttgagtcaagtgcaatacgcagtgggtgtcacccaacctctcctggctctgctgaggtcgtgatccctctgacccaagcagaaaccctccagcttcggagcagcccgtcgcctccgtgccccaagttggcatcccgagaccaagctccagggagtcgggggtaaagaaaggccgatgctcagagcgtccccagcatcttcctggggatcctccgcggcaggggctgcgacctgtgtgtggaagagtcgtcttagccctttccgttatggggctctcaggcaacaagattccacgggagactgtgacgaccttctccagctgcccagactttcttgcccgactgggctgaacccgagcacagagactggtgtcttcccagccacacaatcttgattcccagccgggtgaccagcttggtctagggagtgaaggaagggggtaaaggggagaggaggaagggattcgtttcctgtctgctttcttctctctgccttctcagaagctgtgctgttacagagaaaaactttctaaactacctccccatttttctggaaggtgttgcacacatctccccttccctcaatacacacagctttctctaccccctgctcctcccactttccggaaaaatgtaataggtgtgaacatcgactaagcccagtgtcagtagcacagcaacaagctaatgtgggaaggggtttcgctggtgtttatttctgaagttgctgatatactcgtggcaagggagcttggcttgttgcagagtacgaagccaagcccggggcgcctaggctgtgaacacctcgcgcgaacttggtccggcctctaggtccctggcctcgggcccttatgctctgccgggggccaggatcaggttcctaagaaaacagaagagtcaaataagtgatctcgctactttacgctccctgcccacccccacccccaccaccacttttcttttcttcttttcttttttggttgatggtctgtctgtactgagcgggtatcccagagctgaggtgcaggagtagtgagcgatgccggggctggctttcctagatttaggaaccgccggggggcggaggagagtcgaaggggcatccacttctttggagggaggacgccgtttacttcccgcagacgacgggcgggaagacctcggagctgagggcttcttggggtggctctttgagcaggtaattctgcggcgaaatcgagagcgggtgactgacacgctcggtgacgacggccaggcggggcagcaccctttccggttaacaaaatgattaaccttcctgccttgcctgtagtgggctctcccctcctccttcaccctcccttcctccgggattagggggtgctcttttcaaggagagactggagactcgagatgtgggccctttctcgcctccgcgcggcctttcctcggagccaggctggggaacccggtgaggcacgcagaccagtcccttcgagacgcccgcctcgcggaatcgggttcaccggccctgtcccgcacggtcccctgggtcatctccccctgcaaccacttgtctgaaacttaccagattccaaccttaaggcaggaaaaaaagtgtttcatatacaaactgatcagggtatttgcagataattgcgaatgtcaaatactcgggcgtgatgacaaagtgcagagattgccagggccagagcttggcctgaggggcgggggctgctggcggggctccagggccacctcaggcctgcccagaggcgggcctgcgaggggtagagcagtcagccgcaactgccaacagcccatttaacgaagacggctgcttcttctacccctcggctatggagctgattcatggattcattcacttagtctatactggagctccgctcagggaggaggtgcgagagtggatactgcaccagcccagctctctctccctcactccccactcctgatgcacaaatacctcactgcaagattccccacaggtggaattgctgggcctcagttggatgcttaggcccaaagcgaaggccctgccaggcggtgctcccagagctaatgtcctgtggcagagtaggaaagagctacaagccatttaggacaaacaagtgcaccctttgatactgaggttagtcttcaatagaaataaagagggacattaaaaaaaaaaaaaggaagaggaagaaacgaaatactggacccacccaccccagtcctcctaccgggttgcaggaagccatcctggtgccatcagagcctgggtgcaaacggcccaccagagctgaccctgccaagctctcagtgacagcaaaggtggctgctctcaacagctttcagagcaactcctctgagaccctactgcaggcacactcagaatgtttcaagtgccttggattcttaaaaaaaaaaaagagagagagagagagaaagaaaaagaaagaaagaaagaaagaaaaaagagtggggcgtggagggtggtgttactcttgttggattccacatctactgaaaactgagtggatcaattatgggtgataccatgatgttggtggcaagtctggcttcccaggccagaatcgcaggggtttcaggacctggatgctgagaccgagaggagcagtggaggcagggacaccccattctgcattaggtggcataagctgcagtcactgaggccctggccccggggtcctgtgtcctaggccaacgtggtggtggtgagggggctgggaggggtatattgcggtagggatgctgaaagaccttgacctgactgccctctcctttctgagagctaaagaatgtggtggggattcttccaaagccgggagaaggcaagactagtgtgtgctagtgggtgcagctgggctgcagagggagggaattcctgccgactacagggagccctctgtgcttgtctctctcccccgccctcagccctcttcccctttcattgaatgcctgaagtcagagcctacctggaaaccctcaaaattttacactccacttgtccgaggtttccaatgatgacaaatttgaaaaacgcttcggctgaagcccggcacctaaggctgagagttggggggaggggaggctgttggataaaagctccttggaaaagacacacttgcctccccctttttcgccacgcggaaactggccggtctggacaagggattgcgctgggctaaggcctcgggctggggagagctccagcagcctgaaagccgaatccgcagaagttatccacctggctccttagccaccggccaacaagagggctctgggcgtcccgcccttcacgcctgtattagaaaggcctgagtctggccgggagacctgacttgaggtctcttgggaggagcagggggtgccagttctgcaggggacttgcccagttccagtgaggctgatgtagaaaacaatagctctgtcctcagcctgggcggccagccggggccgcacgtgtaagatgtgattctatctgagtttccaaatctaagtgcattgattgaggcccaaagagttcacggcgcataactgtcttaattaaacctgctataaacagacaaatcacttcttgttcttgtaaatagagcttggggagatggcacagggtctggcaaaagccaggcttggggaacattcttaaaaaaggaaaagagtactgagacacagacagaaaaagaataaaactggagtatccacatcttcagaaaatagctcaactgaaaccaaaatatgccatagcagggaagtaatgtgagacaccctaagttcccagagcagctcagtggaggctggtagcccaggatgggaccaatggtggaaaagcagggagccggagagaccacaggttgtttgggggaggacaggtgcccattgctgaggctctgagctactctacttggccctgcactttccttgccaatccttccatctttccctgccactgatctcaacttcctgatactgagagacagtgctgggaggacaagtactctctcaacttggtcagcttgggggacaagggctggtcaccaagagctcagagatagcaacaactggggatgatgggtgatcataggagtccagcgggagcagatgggaagaaaagttgtctgtgatcctctgggaaagcagaaaatggggagtatgtacacccacagctcagattctgctgtccctaagtgccggcaagggctgggggatgatcttgagtagggtcaggtgctccagtgccccagctgttgggtgtccagaagaggttaggtgtgtggtagctctgggaagaatgcgcgagacgtccttcacttggaatgtgcaaagggccgggtctgtctccaagtaactccgggtctccggaagttacctggcaggggcagccctcagcagactttgggtcttacagcataaaacgagacgaactaaggggagcccaccacttttctagctaaaagtggaaaggaaaagttgtctataatatgtaaatacaggagatatgagtgcacaggtttgggtgggttcctggtaacttctggagccgacttttccctggtcttggtttgcaaactttaattcccatttcttttcctttactatttagcatatgactctaacaataatctgattcagaaatactcttcatttcgttaggctaacattgataaggaatttaagttcaggtaaattttagcacaacacttttctaaaaagtaactttaaaagtgtttttaacttccacacaacaaaaacgaaaaaagtatatatcactatggttggagagaaacattcttagattgcctttatatttcagagactttgtataggtgccagcaactccgcagacactaacaaatgggttatttgcagttattgttcatgaaaggtcttttatatttttaaattacggcatggttcccaggtggaaaaattccttacaattaagaactggttttcaagaagattggaaaaccagaacaaaaattacaacgttttatcatatagaagtctttactgaaaacaacggatattgagtggaagtcagaatgtaatgaaagttaattaaaatgcaaactattagggaaacactgcagatgtctttctgtcatatccaacgggacagtctttagatattccaccctcccttatattatacttgtattgtgagacttgaatggttgtcaacagttttctgttgacagaaataacaacagttcacctttgaaaactcttcactcaaagctacaatgatgattgctctcgagacaaggactgctgaaacaaataactttcacacatctacactcacacttgcacaccccaaacgcacacgcaattgccggtttttgaaaacgttgcctctgaatgagaaagagagagagagagagagactgagaaagtcgaactcgagcttaggtaaccaacaaacccaattactaggctttattgatactaaaaggaaaagttcccctcgtaaaatttctctgagcttattagttatttaaatcagccccagggttggacgcgtgacgccgaaggcaccttctgtcggctcctggaggtgagcagccagcgtccctgcgccgacccacagcccctcgctccgtcctgggcacttggggcgaaggcgggcgcagcgagccgaggtgagccactgggcaggggcgcagggcccgacacgccgggagagagctccgcgtggcctagggtaggacaccgggcatcacactttggaaaggaacaggtcccagccaataataagggagtaggcgagtaggccacgcgaccgcggggcgcaggagctcagccggcccgctgcctggctcgccagaccccggcccgctgggcaccggcccctgcgacccggccggagcgctggtgttcgcgccgtgagtcgggcgcggggcgtctcagacctccagggctcgctagtgttttgtgtgggtctgggagctttgcaattgggtgggcaccaggtgaatttacacctttctgggtcgctgtctcaatagttgacaagtccctctgtgtgtgtgtgtgtgtgtgtgcgcgcgcgcgcgtggaaatggtggtgggggtgtatgtgaacagctgaatttattgaaaataaaccccaacccgcccagtgaagtcctctaagcccgacacggggttcccaagtccggatgtggctccgggaccgcgcgaggcgatgccctgttcctctgggcttggctgtagggcggggagggaaggcaccacggggtgggggagaactgagcccgagtcgccgccgtcacagtcacttgggcctttcccggaggccaaggtcttgacggactgaaacggtgtccgaggggattcgtgataccgagaaaacaggcgaggcgccagctcgggaagccctctaagttggcccccactccttacgagtttgggccgccggatacactgcccccctcgtccctggctccagtaggtgtctgggaccgtgggtcccgcagcgggctttttcgccctctccgcttggttcaagaccggcgtgggcccatagcctcaaagcgttcgggaggcaactgcggtttgggcccccttgcacccggctgcctgagcttgcctgcccctacgaggggtgggagcggatttctggacgcctgctggcctgcctgaaatttggggtgcggaccgggtgctatcttgggctttccaggtgtacttttcatttcaaggggttgggacaaactgtgggcgttcgtattttgcacgcgccagggcgtttttgtgttgagtggcccggtggtaccctgggccagggacctgcccatcccccgccacatccttaacccgtggactgcaggcgacgcggaagggttggctccgggacgcgaccggcagagccggcgccgaaggtttcggcctcagcccacgcggtggcgctgtcgggagaggacgctggggctccgggccgggacccgggcagtgacccgggctcgagggtggcgggacattgacgccaagccgaggcctcggggctcttcgcagccaccttgggcctgagatcctctgcctcactcggtgtttccctaaggaaaacgcggcgggtcgggagcgccacccggggccccaaccccggcagctccgagctgggggcggggacgcagcggcggctccttcggcgcttccttttcttcccccacccttgccttgttgtcccggtttacagtcgatttctacaagtaaactagattagcagggcagtcattctctcgcagcgtggttgcagaaggggacccacctattaagttctgggctctgcaaaagaatgaagggcgccccggggggcgttgcctggtgtggtagggtggtgctccaggccgcaggaccctccgtcttccccggtcccccggcccgcggccgccgaagggacaccagatctcccaccaacgactcccccagctctgaaacctatctcctcgctttcttcccccagggcaggcagtgcccacacccgacgcccatctcctaccccgggaagcccagtgcagaaagctccccgtcctcgcctgaggcagctcctgggccgaccttggcaattcccttcccgcccacccggctcctgaacggtcggccccactagccccagaccctcgggcctctggggtgctaggctcaccgcctagcgcagactcgttgcccaccatccttccccatcagtcgtccctctgaggcgtatctctctgctcgggccgcaggggctcattcgcttggggccgggaggaggacctccacagtctctacctccggcggccgacggcttccttccctctccgcccccgcccagaccccctgagctgccgggggagccaggagtcatttatctttgcctggcgcgggttgggatttgtccggctctgatgccaacgaggaaggcgtgcggataacgaagtaagtgtcccccgccctgcgctccggtcagtccccagacgcccggagcactctgggaaagggctgaagcccaccctgggcgaaccgtcctccaaggcgcgtcccccactggggtattctggcccctggctcttgtcctcttggcgcatctgatttccagtctaagcccctcgcggttatgccgtccgagaaagtgttggtcgccaactctccacggacagtccgcggcggaaattggcttcagagctggcgtgggcttcatttgaaagaaatgattccctcccgccctcctcccgcccccaggagggcaagctccaggggaagaggcaggcccgcttgggttcctagaagccgtcgaaagcttttgacgcgggcgattcccatagttttccctgcgtgttccagggttgagggaaaacgcggcgcaactttccagggctctttaaaaggcagggtctctctgcctgggtgaccgaacttgaaagccatggaccttggggatggatgccgggccctcagagcccgggatggcccaggcgagagccgaagtcccgcgcccggcaccctgcaccctccacccaggcgcccaggcctacgctgtccggagcgggcctctaggaaggaaggttgaccagggtcgaaagcacgcacaacaaaaacttggtgtcgacaaagagaaatcaagaaacgtcattagagtgcaggccataaaagaaggcctgacagagagaaaaggagagaagatggaaataagaaaaaccatacacctttaacactagcatataaagatctattgatttttaaaataacaaatccgtgtttgtgaaaaacaggcggccttttactaaattacataaggaaaacttgggaggtgggtgaagaaaaggggaaaagtctgagcagattcccgacaaaaacgtcagttagaaggaaactgagggataaaaatgtcccccagatgtgaactccatgttttgagcatggaagcaaactatctcctaatgcacaaaatgggttttagataaaagtatttttaaaaatcaaacgtaattaaaacaactcttttctcgtgattttgttttaaaaagtttggaaataaaccttttgagggatacaaaacgaaaccaaacaaatattcttgaatcatcagcaaatttattcatttactgttttaaacaatacaaaattctagcgaaaggtaaaactattaaaatatatcttattgtcgaaattaaacctgctggaaataatcgcttcagttgaaataaggtcaatacaaaaattgtgcagtaaaaagcgtatgtaatttgaaacaaaaaaggcctttattagagacaaaactcgagaggacaaaaacccacaccggacatagatcacaaaacttcctagaactctcctttaaatcggaagaaatttgtaaaatgtgatatgaaatacaactctacaaacatccaaaatacatttctggtcataattaatcgtatttgacattttcctctaagtttaatgcaactttaaataatttaggctttttcctaacatgatagatttttttcagtatcagaaatggacaagaggaaactccagtaaagagaaaagcaatgaatttaaaagggtgcagaatctgaaaacaaactaaccacaatgtacatttaattgtacttaattgtatatttcatttaaatagtccttctcaggggtttaataatttagaatcaatagttcccttcaaaacataataaaatatttacactttataaaatattaaccgattaacaatacagccgtgttgtttataagagtgtaactgaagtcctgcaaatcatgctgttgacacaagcctgtgaggttagcgaagtgatccttagcaaaatgtaaatgaagatcttcagacagtggtgtttataaaatagctcattaatgacttaggattgaatcgctccaaccattcgcatcatcagatataataatagtgacgaatcagacaggaaagatcctggctaaaccatttgcatttttttccagaagtactgaactcctaatatcaccaattcttctaagttcctggacattgatccggaggaggattcgcagttcaacatcaaggtaaggaaggatacagcattgttatcgttgttgagatattagtaagaaatacgcctttccccatgttgtaaacgggctaagtttgacagtggtagttggcttttgcaacacccccttcccatttcgacatattacagattgaagaaaaagtttgttgctcaaaacttacagtttgtttctttgcagccccaaaccttttagctaccaccacgggttgatttactagacccatttttgctctcaccgacttcgaactgtgcattttctcccactcttttgactgggggtggtatgcggggggaggatggggcttggtgaagaaaaccagggaaaggcaaacgctgcctaaaactcccagggtggctcccctaagaattgctatcctgcttgtttcttttctcggctgggatccgaccgactcccaggtcgcctcggacttctttggaacttggtgggcggcgcctaggtgcggggttcgtggtgatctgggcgccgacacttaggccgggggcaggtttccttcctgggaccctttctcttccagaggctctcaagcctctaagcccgtgcgcatgccgcctaccaggtagatgcggcgagggcgagtggaaggcagccttgtcccgggcacgatcggcggactcagcttttcgcagtctctgctcccagcagggatttacagaactgctcccgagagcgtttcccgaaaccgaacttagtttggccctctggcgccgccgtacagtcaacgcttcttaagggggatcggtggctcttgctgcgggagatgtgggagagccctcggggtcctggggattaggagggagagtcaacgtgtgcgggagggacatgaggtgcaaccagttgaggggggattctctggcctcagggccggcggggatgcgtccacattttctcgcctaaggtcctagcggctaatgtccgccgacgccccgggtatctcgcgggggctgcggcccctgcccacgtgcttttccttaaggaggcagcgcgcccaagcggaatcgcagggacaaaagcgcggccagaggccagcctgctcggctagtgcccgcgccaccttaaatgagcaccgcggccggagtcgggctgccggcggccgcggccgcgggagtcggcaaaagtttgtggctctgttacgccttcgcgggacctgctggggacgctcctgtgcggcctccccccgggcggggaggccgggtcctcagggcacagctctgttggcgccagcagccctgggctcgagcagcttggggtccccaggagccccagtcctgtagcccgaggacaggcagccccaccgccctcgccgccaccgcgtcacgggctccaggcggcccggtttgcaccgctcgcgatgtcgccggagcggcgagcgctccagcgatgccatccagggatgcaccccgctctgcatccaccacgcaacccccattcctgtgccacccacagcccggcgggcagtggccgtgctcctggcattcgggacaccccgactattgttccggactcgcggccgtgccagctttgaaggagaagcggccttccctgcgcgcgcggcggcacgaagcgcggcgggccgggacgttcggctcggcgcggagggggagctcgcaggcaccgggaaaagttgctcggaggggcggaggcggtgggtggtgggcggaggcggtgggtgggggaggcgatcgccctcctatctccaaagtcgaaagtactccgcgcagttaacagagctgggagccgaggcagccgcggtcgcctcttgcgcgtcggtctgcgtctccgccggcagacgcggcacccagcgactgccttgtcgccgccgcctccgcgccgggacgagtgcgcctaggggctgggcgaggcggccgcgccctggacccgccacaaggaggaggaccagaccctgggccccggtgcccgcctgcgcccagacgcacccacccgctggccgcggccaccgcctcgcgccgcactcggttctctgccatcggtccttcgccgcctcgtgcatgaggtcctcgtcaccccgctccgaccgccgactctccccttcctcttccctcctccctgcctcccacccgcccctcgcctgtccctctgcctccttcgcagccccgccgccgttgggtcgccgtgctcacagcgattgattgattgatgtttaatttcctgccaggcggggcccccctccccccgcaacctccccagccctcctccccgccccccactcccctcttttcttgcggtggaccagtctggcttgggtttagatccatcccccccacccccatcccgaaataatccagagacttcccctacccccaccccaaattattattttgaaggcgctagatctggggaccgaaagggggagggggagaaatcggaaaccgaggacaacccaaaaggactcactttgcctgatgactcaacgcaactaataatcatctccctctcagtgtgtctctctctgcggcttgtcagtgagtccggctctggctgctggcagaggcggccgagaggggagaggctggaggtgacagcttgggcggccgccgcgtttcctcccgcgcgcggtcccgggtccctgcgtcttctcggctcttggtgttaccggtcccaccgctctggccgcgcctcctcgcgagctagccgccctgcgaaccagcagccccggctcgccgccgccgccgccgcctccgggttctcagccctttctctccagaacgggtctccttcccgaaggtgtgaaaaggctctttcagcctccttctcttcccccctcctccgccgtcccctcccccgctcgctcgggtgtccctttggaggagtcctttccctctcctcctcctccccctcctccctccccccatcatcatcataacaaccatctccgcaccagaagaagacaccctgacccaggaccttaaacattaggacctggggaagagggaaggggaaggagtaaagaggaagactaggagaacactgcaaagccaagcaccagaaactttccaccctggattctctacttttgctccatggacagagccccagtcagccaagtttcagacagaccgtgagcagtaagtacgcagggcgagggctcccgcgccgcgctcgggagttcggggaagcccagggccaacgaagtcccctccccgccgctctcggcctctcggaccgcgaagtcggggaatgcaggcggaagcctcgccctcagccctcctgctccgtgtcttcatctcgcatccttcctttcacctccccctgccacccccaccttgtctccttgacccgtggcgccgacactgctcgcgcggccagagcgcccacgaggattcccagcgcgcacgcagtacggtgccggggtcttgcttcttgcgggtgtcagtgacaacgcgagcgccgtttcatcaggtgtttcccctccttccccgcccccccccacccccccaatccaggggtgtcgagacctgcggcttccgtggggagcgcactgccaacctagtgacccagaggaaaactttctggagcgatgttaaaattggggcggatgaaggctgctcttgcactaagaattcaaatgctttttgcttttgtgttttatattgaagagctttaaaaaagcactggggatcagatgaagataagaacgctccaaaataataacgattgtagcgcccgcctttgtgatggaggttattctgataaatacctccaagtgttttcggatgcttattaatgtggaattagggttgattttatgcaggtgtgtgcttatctcaggacttgctccgtataggtaaaaagcgggtattcaaggggttctttcgcccggcctttggctcctgcctggccattcacagcgcatttaccgggtggttaattcggttatggacttgcgcacacccccaactcccttcccatgtgggtggaacgtctttttctgaagttcacttattccgcaaccctgaccccgggacgggctaggctgtagcacccaggaacggtttatgccaaccccgtcccaatgaatggaccacttctaggcgcccctgggtgccaaccccggccgcgaccccgagggctgacttctggggagctgcgactgggcagagtcgccgaaccgaggcgctgggcttcctgggggccgcccagtgtaaggttgggaccggcttcccggctcgggcccctcgggcagcgtgggaggaagtttgtgtggctgtggtgcagcgctctgccactggcctgaacgtctatcacgtgtatgagcggttttccctcttttttctccctcccccttcctccccccaccccctccctaggtccctgtgcgttttattgcgacctgccggtgggaactttgtctccgagtcggagcagcatggagcggcggagcgagagcccgtgtctgcgggacagccccgaccggcggagcggcagcccggacgtcaaggggcctcccccagtgaaggtggcccggctggagcagaacggcagccccatgggagcccgcgggaggcccaacggcgccgtggccaaggccgtgggaggtaacagcccggagcagggaggcgcgcagcccgcggcccagtgataatggcccgggtgtcagggttcaggttgattaggcgctgtcgcggtgtaggattacaggaagtgaattccaggttgccaaataatgcccccgtcgcctctcatctgcaactggtagcttcatctccagttaaaacaagaaagtggttttacccagagggtggcattttttgggcattttgccactgtgtgctgaggtgttggcaggtttatgtcacagccagctaactgtttctagattttcctagagagctttttagtgatttaactcttttgccttgcctcggagtgtctgttgtagggatgaagttcacgtgcgttcgcttttagggaataaaatagtcattaatgctcaggcgagtacaggaacaaggagagttgatgttactttgtagtgaggacagtgcttcaagacagatgaatgacaactgggaatatttcctgccacgtgaaatgtgggaaataaagaatcaccatgaatccatcaggcccttagaagcttaaatgctgctgttgtctataaagtttagtcatatgcattcgtaactttattatgaattataggagaacagataaaaatagcaaagtagccttatcaactagatgtagtttcccctccaaagaatttattaataattttatttaaagaaaatcttttgtagtttttactacttaagcaactactttcttttaaagtggtcaggaaaagcaatcatacaaaataaagatatgggagaaatttaaacattgaaatattttggagtttgtatgccatttgcttagttgtcttttacatgtaaaatccacaattccacatggcatgcaggttttctgtgtgtttggcataaatcactagtttaattttttttgcctctaacgttttttctctaataatttcaacagtagcccatttaatattcaatatattaacttgtcttaaatgatataaaaccttggcaaaccttaatgataagctcccacccccttgttgtaagtgtctattgtgtgtatttcaaaatagttacttacatctaaaaatgttcattcctccttaaagagttgaacacatacgttttataaaatcgtatttttttctttttacttattttgctatttctatttcttcatggtaaatacttaggatggtttgtctcagtctttcatattaatcgtctcacttgagaagtattcatcctttcaatgttgtgagttaaaaagtttggtgatggattctggcttgtttatctcccctttttgggacttgaaaatatactttattgaagcaaaagaaaacagttctgtgacccactttttaaaagagaggtttattaatttgttgtcctgatactggagcaaataatgtcagacttttggcataatcagttagtatatgcatataagaaataaaaattcatagagtatgatggtaccaattatgagatatgctaagtgctgaaaatgtttgaaaaagttctgaaactccttggagacagtgtgttccaaagtggcctttgtggacagaaaaggcttggacttaaaattttggtatctttctgaagatctaataaaattcactaaattgaaaggagctgtaaacattttagaatgtaattgttaacaacgtgcttccctaaaacaagttttttcccctcctctatatcatgttgaactatgaaagaaagtgccttgttctgttgaccagggataactttagtgttaaatagtggttggttttcaaattttctgagactatagttcacatttgagcccttatgtgtttaatataaactaaaattattatcttggtgaagaataatagatttgtttcaaccagctgccttagacactttctcttgattaacttaatttagtaatagcagaggtcttattagctgcttcccaaattgaaaataaagatgacattattttgtctcaatacatatcgtttataatacacgatagtaaactggttaaaattgtttagtggaatttaaatttttttaaaaaagacagcataatagtgtgtaaagagattaatttagacaactttagaatataacaacttagaagataagattttgatagtacaaaggtttctaattgaatgttaacaaaattatgagtttaagtttatataatttccaaatgtatgttaagatgttaatagtttctttgtaactgttaaccatgtatacagtttggagcaaagccaggccttttgaaaaatgcacattctaaattttaaaaaatgtttaaaatacatttctagttagtttttttataattaaaggatttttttgaacatagagtaaatataaagtagattatatttctaccattctatgttcttttgtttaaattttctttataaagcaatataataagcatagataactacacaagtatttatagctctgtatcatttattaccgttttcagatatattgcagtcttttcaatggtgtaatgatggatacaataaaatttgtcttaaaagtggagccaaaaatttgggagtacatatttgttaatctttagtgttcctctttcttaaaagctgttcttttaaaaataagggagatcaagttaattggttgtcaaatcaaatagcaatttatcttactgtttttgataagcagtgaggtaaatatagtttaaatatacttctgaatgcattggttgcagtaataaattctgctgttactctacttatttaggtagagggaatttactgtgttttttgatgagaactaagtattcataaaagaaggggcattactttagtgtctcaatttaaatagaagagagggtagatacactgtcactgtctttaaggttgtgttttaacaggggacttaaaagtggattgtttactatgtggttagctttagaagactgttagaaactagatgttttgctttgtctttccaacactttctgggatgtttttactcttatctgagcagtgtgttttaaagcatgtatgtaataaaatgtaagtgctcagatgtgtatgtcagtcagcttttacagacggtccttaggaaaaaaaaaaggctaatatctctttaaaaaacatatgaaggctaggagagagtttagagctagcaagagcaccatggtgttgacagctttatatccctgctgggtaacattcacttactagaattggcgtcccctctcagctagtaattcactccataaggattttgaaaaaggatgattaatggtggggaaatttatatttgtgaaattgttgattaaaacttacagatctatttgaagatttaggaaaagaagggattattaaggatgatgaaaataagaatcagatgatcctttttaccactattagcataagtacctaaaatgttctgctgtatggaatgcttcagccatgcaacttacagcataaaatgaaagtgatgccaatcaagtttccagaggaagcaaggcattctgcttttctcctggactgctgaaaggtgctggccagttgtgctttaatagcaataaattattgtgcttcattcattgttaacacaagcattttcattttttaatgtttggcttaaagaagaactttcagacagctttatttaaactgaatgaacagcgcttgaatataccagatggtgtatttgctgataggagacattaaacatcagaaatctttttgatatttttcattttcctatgaatttttatgattttttggtgttaaatgttctacattttagggaaaaatatttaaacattgaaaatatcttttagagagatttgctttttttattaaaaaaacttgcttatttctgaaaaataatttatgttttataaataacaatttaattttgttggcatactgtctgttaaagttatcttataactagtctacctgaagtagacctattcgtgctaccaggcagccctttcaagaacataactgtcttgttgcaagggggaaaaaaatcattatgcagtacacactgatgtattcaaatagggaagcaaatgtgatcaagattgttagtcagggcctcatttaaagctgaacattgtctacaacaacagttagtttaattgtctacatgtggaacacttccttttagatgaaaagaaatgcagttcgggtcaggtgtagtcaccatatcagcaacagtagagagacatttaactttttgaaaggaatgcagatatgaaagtatagataggtatatattgagattataaaatacttagaaatatattgttaacatgggcaaaatggagaaaactccattcccaaggatgaatatcataatatttgtaggaagtacacattacttcaaaagagaaaagattgtatttctccctcctcactttttttttttttttttaaggttttaagatcttttaaatagaatgaacttaggctttggggtcatccaacaatctagcctgtcctctgtagttttgctgaggtagaaaaataactcttctctaaagtgtttttagttcttggcctgttattaaaataaagatatacttggttaaaaaaatatatgcagtggaacatacacattaaacagaacatagggtatccgcccctcaaagtcctgagcataatttgatgtttcaagtaattttggaagccttatgttccatcagaagaaacccactgaccattgtatactcaagatcatctgtagtgcagtgtgtgtgtgtgtgtgtgtgtgtgtgtgtgtgtgtgtgtgttggaactacatagatgtcccttaaggcatctgttttttaacccctgcagaaaataagcaatatcatcctttcccagagggttgtaaccagcaaagtctgtacatatgagatatcctgtttgaattcttcttttctttcttgaattttgttttaaccaatctatctctgtagagaagggaaaacagactaatcatcatttattagatagctaagaatatgaatttgagtcattttaagtatacggaaatcagttttattccaggaaagactacagtaattatttggtatatctgacaaagtagtaagcagtgaagtttgatggttataatttaaaacccctatttttctttctttttaaaaagtatttattatagaatcagcatatgtgtatatatttaaaaagacatgttaaatttacagggctagatgaattccaaatagtattattttcttgggttatacttatcttttaaagctttttaggtttctgttggaataaaatttctcaccattaaaatgtttcttatgactaagaacccacattaggtgtgtaaaatatgtacattgttttatttcagaaagccaaactttatcctatatagcatgtaaattaataaagaattctttatattgtttaatcagtaggcttttaaaaaacctatataactaatatatggtaacatagtaatttttactatcttccttacatgaatactgagatacaatggcattttggaacatatttaaagatggagcatttgacaaaagttgtatgtgtaacagtttgtcagtgaaaagtgacaagtgggaaatgacaaatgaaatgttggcatcatcactctttattttgataaaaatgtctcaatttgcagtgatataatactgtttcatattatttcatgagttgtgtgagaatgcataaggggaatttagattttgtgaacggaaaattagcagcccaaagtctcttttcagaagctttggcagcaagttccccgtctcccccactccccaagaataagaacagcagtgaaatgttggatctaacccatacattttaactcattattttttggaaaaaacagagaaataacctaaaatggtttcgagtaggagacctttatgcttaactcaaaaaaatgaagaaaagagtttgccttttagtttctattcttttctttgtagcaatttttaaatgaatgatttgcctctactgactttgattgtatggtcttttttcacttccaatcaacactgctctccagcattaatttagggtgccagtaaggagagctgtgaattcctgttattttaaaatgcaatagaggttttgaaaatgtctgtggtgaaaatggatttttatatacaaaagattcatcatcctactacttaaatgtaatgtgataaatatttcaaagtcaaagtagatgccctgagtggaactgaggtatgactaaaacaaaaaccagttgaggacttacagagtttgaaaaaagcacagttgtagtcattatagtatgctattttccgttgctctttattgttagcaattaaccaaacattatttttcttcttttatgtagaaacaagccctgtaagcataacatgctacagtgtttttgtaaaaatgttccatggtggagttttcaaaattatggaactctagctatatatatttgtttcaattaacagaattattttgctttttagtagcaagtgatttaagaattgtggtaaaatcagtataattaagtggcactgaaaggctacatcagaaattgcattctacaacttctgtatctttgctgctcaattaaaaagttttacttatttcagatttttaaaaaactagataaaaagacataatatggaacaagtgtgctttagatatataattatgacaatagagtttatggcatgcattttttttcccctttttaattgatgtcctttaacttaaacaagtggatgttatggttattagtttgacaaatgcctaaaatgcagataaaagcatgaatagaaattttaagaatttgaaacttgcaataaagttatcagcaaactatgtcagttttatagtaagcatattctttattaatgattatgacacataggacaggaaaaccttctggggaaatatatttcaattttagttgctcctggtactgttactcactaatagtgtgtgggcagattcagttctgctcttacctagtagccgtatcattggaatggagttctatcgtagtacagttggttattaaactgtaaaataacaaaaaagatcaaaaaattaaggggaggcactgcaagctactatttatcaaaagggatccatttcaaaccagggtaactggtgcccactgatggttgcacagttactgaaatgtgcacagcagctcagtgtctttcttttgtttatttgactgaagacttacacagatatttatgtatataatatataaaataagagactctagttagagcaaatgttttccaaagtgctaagatctgacagaggtgatttgcaggggtttgtcgtagaaacagcgtgaatttcatcacgttaaccacatatatctttttctttctttaaaaaatactttttacttgtttttgcatttggctggaaagcaagtgtatcagttctttcataactgattgtgattgattttttttttaacacaagaaaatattttctttgcaaagagagcaaatttgattggatgccatgcccaagactcctgggaaaggaccaaaggaccaaaggcataaagtaaaaataactgtatttttagatttcccaattatgtcctatattaaaattgagtacttttattgcatttgtttcaattattattacatataaggaaaggcaaaattgatatatttaatagcttactgacgatgcattcatatcaaaacacttgaaatagcaatagcatttttgaaatattattttttgggggttaacagaacaagaactttcttttgtcataatccaaagatgctaacagagcagcatgataaatgtctctttaagtgtcgtagtaaaagaaaatgacttgtcttctgaggcagtggagagtttatgttgttttggacccatttcccaagcagtgatcgaaaacagattacaataacaattatacagtcagaagatgcaatatccatttctgctttaattgagtgaaagaataataaaaacatcattaagaaaaatgaggtggacctgtcacacaatgtacaaatttttagtcttggagaagatgcagaaaaactgaagtgcttttcgcatactttgttgtgtttattagctaaaatctgttttagggagagaccatttggctctcattcttccctgggaagttcaaagaggagcccatggaaagtggttgcccaggagacattacaaatgaccattgactttgtcttcatacacagtttgaccaggaaaatcccattttcttaaattctacctgaggtggaactactctctccccctcctttttttttgtctctgtaaatggaagtcagaagtaatgaatgttcctcttgttacaaagcccagccaagtaagggttagatggggttcctaggcctgctgttcttcctcttcccaaagtccaaactaggctgaaggggagagagttgaggctgaataatgagcaccctcatttcttctcagcacacaccggggtaacctgagttgctctgtgggcacatcacctgaggtgtactcacctgactgtcacctgaaatgcagaggctcttgcttcgacctgcaatcctctgaattatgaaatcgatgtccttaacattgctgagactctggctctcattccacagagctatgctttcagcaactccgaatgaaccgccaggcagcaggggctgcctggggctcgttttgcctcactctgggctgtatttgttactctattaatagaaactgtgagctcctgaagaaacctaggtggtgacggtggagttcacccgggaaccttgacttagggtggggatacctgaggtggggataactcgggttacccccatgtgtggtggggatactaaaactgcagataatgtcggccatcagagtagtcagagctccaggttttactcagttgacagacttaggggggaatatttctttcatctgtcgctgagtttcttggatttaatatttaaaaaccttcctgaggtgacaaaatgaaagaaacaagataggcagtacatcctcctggtggaggtctcataatttcagaactctcccgagcatttatcatcccttttagagtgggatgtatatcaaacagccccaaaaaagcttttttaaaaaagttatttaatccatagagcctagttaatagtgccttcattaaaatgcttttgtcagcaaagggttttcagttttaacatttgcgtaacctaacagtgttgatgaaggccatgagctttaagggtctattagtggttccgtttcttctggactttataatttaaacctaaacattaattctgggtggaacttggcataatgtctttttgccttggaaggaatttttgttgtacaattaaaagaaagtgttttggtttttttttcatacgatcaccttctccatgtccctcttccccaagtaaacagcaattaaatagtcaaggttttaaaagggtttctttagtttaaaaaaaggagtagttattttaggtgaatttaacaattttccattagttcacattgcaaaatagtgctttggtattaacaaggaagttctgtgaggctgataatgtagtgaaaatatttttcttttctgtccctctcccctgtatacaagaaaaccctgtggtaaaattttttaataaaaccattttgcatgacagttgaaacttataaatcagttgctattcttctttattagaagctgagagacaaacatgttttaagttttttgtcacctgtaattgtaacattgactagaaaggaagaaattggaatcttaatattaagtcattacgtgactgaatttttcagtattgtttattttggaaaataaactgtgatccttaatatgatctttttgatgtattaatactatgttaaagttgagttattataggaatctaattacatgttaagtgggaaattagaaagcactaaagaaaccttgcaatgataaattgtcttcatccgaaaaccagaaggtattcagagtgaaggtgcctgtcaggagagaagcattcctagagtctccattcagacatctccattcagatgttgccctttagatttgggaaatgtggtattagaacaccccaaaccctttagtatcgacggagtataagaagagcaaattgttccctgaataggaagttattacacctttaataaccaggtaaagtcactttacaagggtaaataaggtgatcctgacttttttccttctcaaatgaatctctaggtaatatgcagcaaaactacctctatttacagcctctttcatatggcaagtttgagccttaagcacgtttttacagctaacttataaactcccccaaaactggggcttaccattgaaagtctgccaacactgttacaaatggtcattagttcccaagaaactttgaggaggaaaagaactgtatgaaaatgccgtgactttagtaagaaccattttgtttcatgtgtattttttgctgccatggcagaactggggactgacctgcatgttcaggattgatactgaacattctcctgtggaaatgtataggattccaattagcgcagggtcagagcataaatgtacctcttttttcacactgttccaggtggttagtgggaaacaagctgcaaagtaattcccttggccccccaataaaaagatttatagcaaaataattctcagctccataacgggactgttgtaggtttgtgtttgatatttgtaggactgaaatacagtccatgtacccaaactaagcatttattgtaaacaagttaactgccaagagcttatattctgtcaaacataattatattgaagattgatgtatagcttgaaagtgagtttgtgggagacagttctttttaaccaaggcaggcttctgagatgcagctctcttcttcctttgctagaatgactcagtaaagccatctttctcgccgccagcctctcatatatagaataaacacaggcttgctctttgaaaacatagctgtttgtcgatcctatttgtgttaacaaaataaatgaacttatagaaactgtcatgtatagtttcttctatcatctccatctagatgtagcgtgatggtgccaagataaaatagtagctcttacctcttgggtgatactcgagttcacccacaaactttaaacgtatactattaagttaaccccagatgaaattctttcctccttcaatatggagtttgaaataatgtttgacttgtgtttctgttattttgtattgggcttgtcagaatagaactgttttgaaactggctttctagggggagggggacaacaccaatacctttattttgtggctcagaaattattaatattttatccttaaataatttatgaaccaaggactctagggaaaatgaaatctttttgagattaaggtgttaatacttggaattactcccaatttaaaatgctgcagtagtcttccagggtttttgctttgaggaaggtagactcttacattttatttagggtaaaagatttctcacttttttgtccaggagacaaatcactttaggctttgataacacttctcaaaggcagtaaaaagtggaataactctttcattggctgggtgatagcctttggataaacatattcaggatgaacataaggtttccaagagatttatatgcagagacttaaatagtctctttcatttttaaaatatttattttaatattttattttggaaattatataaattataaagaggatgtattagaaccataaagtgaaaaaaatgctagttttctctgttctgtttttctgattaatttctataaattacacaggcactacatatatacttaaaatattttgtctgggaagtattccatcagaccctggtttccctggtctgtaggctgggttttattaacttgatctgagtcacaataataatatcctatgtattgcaaaccagagatctcagtcagatcccctaaggggactggagaatacacactatgattttgactttcttgctctttctccctcttgcttttttttctctttctcctttcagcgttagccctttcaccagcttggttgttattgagtcttgatggatgcatttgttgaatataagaatgagagtggcttttaatggctgagaaatggtggtggtagttgcctgtctgcttaagctcggctttgtgaaatctgcattcattgcacagtgttgctttctacacatctattaagtatccgtaaatgttttgctgtttgaactctaaacatagacagtaggattttctttttgtgagggagaaagcctttttttttttttttttgctataactttacttttcagtttttatttgataaaaatctctccattctagtatgatttcctttgaggctctgcaccagtgtttgatctcaatttttaataatttttgtgagttaaactccccaaagaaaacatgcttgtgctatgaaatattcccactagaaatctgggtagtcttgtcttattgagagctgagcacttgattcctttattaattcctttcaagaggacctcagtactgttaacctttccttaacactacactggagaaattaatcaagctgtttttttttaattgtttgaattagataaaataacatttaggcagagctcaaaacctgaagtaaatgttagtataaggacaattttcattgactccttttttgatgcatgggactctgagttgcaaatagcttttccagagaggatgatgagaataaggtggggaggtgaatcgatctctgcttaaatactattttcgacagagtgagactctgtctcaaaaaaaaaaaaaaaaaattctcagaaacctccagaatgaaattttacttaacaaaggacagaaaccctagcattcataaattatggtagagtcatttttaacatgtggtcgagtctcaggacttatacatatatgcatttttaacctatcgtaaaaagaacctgaagaatttaggcttgaactaaggatacttcaacaatatgccatacccttgaacttttctgttatattcaaacttgtatatcctgtttttttcctttctatttttaaaagttatttaattatttattttagagatggatctggctctgtaactctggctggagtgcagtggtgagatcattgctcactgtagcctcgaactcctaagctcaactgatccttccacttcagccttccaagtagctgggtttaacaggctctggccactgtgcccggctcttttgtccttataacattttttgttgttgttttttaaattctaggatcattaaacattttgtctttctgtagttactaaatttagaaaagatactgtagtctttcagtgcaggacatgggtaggactgccgacaagacccccgtggctctagggtgtatacagagcatggtgcagcatgccactttgttacgcacccatccatgcgatgcccgtggtgataccctgacaagttctgtcaatagtggtcacgcacagcgctgtgatctggccaacatcccctggacaacatggagcaagctcctgaatccacttatgtggatcatttcctagaaagctttccttgtttgctgatgctgagtgcagtgcaatggggccagagtgatatggacaagtttgacagctaggcagacactgcctattaatggtggtgattaatatctaactggaattggcattttgttagattaaccaacatttattttgggcctactatataggtcaggctcagggttgggaggggcatgaggcagctaagtccagcccatgtttgaggaggaaaacggtgggcctctcctctacacccactagagccttggcattcctgacatcagagaatttagttccgtaggtcaggcttgctgtggcagagttcccaggtgtggctcaggcttcttttgtttagataagctgccacaaattgcctcctatgtgcccatgaaatactgttttgcaaactgcctggccaatttgatcttgccactaaatttctataaccgaaggatgtttagagacctggagtttctccttcagccttcggacctgacttcaggttgaattgtgattgctttgcctggagtcaggcctggaatcagagatgtggaaggccagaactcatctcccttccctaccactttaggcccagtttgatccttcggggtggtcagtgagcgaggactagcgtccactctcccatcctcatccctgcctatttttgttcttattgtccaaagttaagattggcctcaggggttgcaaagtagtatctggttttactagagagaattctgagaataagctatttcttgatatcattctcaaccccattgcccccacaaatagtgggagagccatcaaggagtttattatcaaataaatcaatattaaatgttattgaatattatttcataataaataataaaattgagaaataatattcaatatattgtaaagtacacattctctgaaaaattcacttgtttttctagttggttttttcttaactcttattcaatatttcttaactcttaatttcttactcttattcaatattattgaatattatttattatttagttggaggtctaatcctgagttgcacctgggtcatgggtaaatatgaaattgaattattgtatgtatggctcagtttgtacctaagagtaattatgatggctgggcaaggtggctcacacctataatcccagcgctttgggaggtcgaggcaggcggatcacctgaggttgggagttcaagaccagcctgaccaacatggagaaaccctgtctctacaaaaatacaaaattagccgggcacggtggcacatgcctataatcccagctacttgggaggctgaggcaggagaatcgcttgaacctgaggtggaggttgcagtgagtcgagattgcaccattgcactccagcctgggcaataagagtgaaattccatctaaaaaaaaaaaaaaaagtaattatgatgcagagtttgccttcctcataactggaaaattgactgatctctacctgtaaaccacttagaacttgctgctgtcccacctctgtcttggcttctgcttcctctacgataagagttaagaaaaagccaactagaaaaacaagtgaattaatgtttcagggaatgtgtagtttacaagcaaaggacagggaggagcgttgaaaactggagcagctgggggagcctagagggcctctggtccacctgtggacctgtgggtggctccctttgcatccaaatgattgctctgctctctcctttaaaattggtgaaattttttttctactgtttcttattatactacctgaaatttcttccatgagaaatttatttgaaataaaatatatattatactgtgaagacctagctgaggagattaaggagaacactaaaccattcaaacagtgtagcaagcatctttttatctattaatctgtggaatttttgagatcagcccctggggggagtaggaggctggagtggaatgtagagcctgtggctgccttagcccagggggctgggtgcctagtagaggacagcagggccacaaagaggagattaggaaggacacactgcatcccttttagaaatttttcctgagaccccaacagggaggtgagaaacaccctattctttctttctatttatggttgcaattttaggcactcaggcttttcttcattattattattattatttgaggcagagtctctttctgttgcccaggctggggtgcagtggcatggtctcggctcactgcaacctctgtctcctgggttcaagccattctcctgccctcagcctcccaagtagctgggattacaggcgcctgccaccatgtccggctagtttttgtatttttagtagatacgggggtctcaccatgttggtcaggctggtctcgaactcctgacctcaggtgatccgcctgccttggcctcccaaattgctgagattacaggtgtgagccactgcgcccagcctctattattttaggatggaaagaaggggctagtggttaatgttggcaagttacttctcttcttgtctgtgactcagtatgtatgtgtatgattgtgtcagtgtgagagagagagagacagagagagataatgagaatatgaggttatagaacaagtaaatcgttgttttgattttctggtaaatttacaataagaaaaaatagtagccatccctcactttttctctctgtcctcttgaagactgttattcactcagtttatgtggtaaagtttgtttcagtatttcaaacagattgttctttggtacttcaggttcagttttatacgaagaaaagatatgcaaggctttgccctacagtctttataatctccagttagccctcggaccttctcaggtgatagaactagataagctgcaggctccagggaagggagtgggccctgtctgctgccttccttcaagagacagatgggcttcaggagctctttgaaagaggggaggcgaaagcctggcctcctctcatctcaaactggctcctgtcattcaggagtgctggtggaccaaggagacaaaggagctagggaggaggctggagacagtgctgatttacactagagtatgaccattcatgtgagcctttgtttctttctttgtctgtgaataacggaagggcaggagccctcttagtttccccctccatgcctagcatggtgccagacacctggtaggcagacaaaaggtgaattcacttacaagtagtacaggtcacccattggacatagcaagtggtaaagggtcctttttattaagaggccaagcccttagatttcaatggatgtggattctggagtgttgttttcaactctcaggaaagcagcctgcttgggatttagagctggataacctgaactattctgcccttgccttgctgtgttttttggggcatgttacttctcccatagtttcagtttcctaatttattaactgaaaataatgctaaccctgtcacagagtaaatgtgagaagataaaggtgtgtatgttagactacatgatgatctaggaagtgcagtgcaaagcaggggtttatttcatgtcccaactttggcgcaagcccattgaatcctgtcacctagacgccctgctgcagctgcaccatctttcgtctttcattgttgggttaaacattcagagccttccagaatacgcattcctcaggtcactttcatagccagtgttgtgacatttcctgaagtctattctttaaaatgaaggcaagggggaaagagctgttccctaataaaagaagttggattaatatagttagtaataaaacagcagcctgcaattgcagagaaggtaacacgttggattttggaatttaaccaagagtgcttctgtcttcaggactcctaagagctggaacacagaggaaagacagctaaagggctcacgacagtcacactattggcctagtatcagtttgtgataaatgtatcctgtgtgagaaaaaattatatattgttattaggcagattcattagaacagtgctctctgatactaatacaagccacatgtataattttaaattttctagtagctacactaaaagttaaacaggtgaagttaattttaataatatattttatttaactcaatatattcaagatattctacacacaattacttttaaaaaataattttattttatttgtttttgttattaagtcattaaaatctagtatgtatacttacgacacatctcaatttgagactagctatgtttcaagtactcaattgctacatgaagttagaggctactgtgatggacaggtagttttactgtgcttttaagcactttcaccttttttgccatggggcatgttaaacactttaagccagttgtcatttgcataataggccattcaataattattagtatcatctttattctgaagaaatgccttttagtatcgtgaacattgattataggccttgaaaaaaattactggttaatttttttcctctgtaaaatggtattaataccgattttgaaaaaaaggaaaacaaatagattccattgtttgagagctatctgtcagacaacttaaatatgtaaaattgtttaatcttcacaacagatctatgatgtagatattgtttgcattttggctaggaggaattggagcttcagagaggtaagatgaactactcaaggtcacacacaggtaaaaagggacagtgccaggacttgaccctgacctggtgctgttcatcaccacatctaaccattttcccacatgtctcagttctcacagctgttgctgtgaacagtggcagttacaatggttaacgctttataaattatacacacttctttagaaataatgtcagaatgaaaatgacagtttcagtatcatcactaatgacagttggaaaaatgcatttttctagtgtagagagggtaccaggcttgttttgcctctttgacaacagaattcatcatttatcccaattaccagaacaactcttcatttttagcaaatggctgaggccgagcgcctgtcctctagattaaagtacctgcttacctcctgtgattgtaaaaggcttagtaaggcttatgatcagaaggttcaaagttctctactagatcatctgaaaatgggtctgtgctacaataaaagaaaaataatattggaagctcaagatatagggctagagcaagattttcttttttcttcaccatttctaaattttgttgaaaatggatttcagttttacatttttattcttttattggaacttttaaattctccccactcttaatttattctgtgaagtgcttttcaagcacctccctatctttctatccattgtcacttttctctctcttttttttttctttctttttccctctttttgcctgggacgagttgttaataagatggacaaatctctctctctctctctctctttcttggcatatatttttactcatccttttatagtttgcttcccttagggatttctggtttttaaaggccttttaaacctgtgccttaattttcttctttctacacttgacctcaatgatactattttactattttttatttctcttgttattgtcattagtaattgcatctatttttcctcctttattcttcttttgtaaaacttgcatttcattataaaaaccataattgtttagatgggtcaaattctagtaagaaggtaaatttttctaagaataagccctttatgatattcttcagtatctcatgtatatgttctgcagaagaaaccctattatcatacatacgttcctggttagtactgttttattttataaatgaccacaaagttttgttttgttttgttttgtttttttttaaatagatgatgccagtaggggattgttgcatgctttctgtaagaagtcattactgttgtcagctaacaattgcttccttcaatcactgaaccaaaatgtttaggaactatttcagtaattgacggttataaaacgtaagtccctacatgttatagatccctgtgctttcatgttatatttcatatctaactgaacagttaatattatttttaaaaattaatatggtcttaagttttttcagttgaccatagacttgagaaagatttatagtttctaagtaatggagacatgatagcttatggagcaattggattcatttaaagatcttatctttgattcccagatgtgtgacactcagatgttgacattaggaactgcacatggattttcagcatcgaaacttatgtacacacaggtattagtggtgaagtagcttatggcaccatggactatatggccttatgtgtgcatatgcttaaatcattagaaataaaaatctacctacttccttgggcaaagattatatgccagcatgtaagagttaaaagctctaaatgggggctattccttgctggtagggactctcatgaatgagtcctataaaatgccattatgcttgcttaggaaggttttacaactcctttaactacattgagggcaggagtgatatcagacttgttcttacttgtatccctggagccactggtggtgatacctgtcacatagtaggtgttcagtgaataaatcctggatacatgaatgactacaaagataatttggggccaggcacggtggctcatgcctgtaatcccagcactttgggaggccaaggcaggtggatcacctgaggttaggagttcgagaccagcctggccaacatggagaaacctctactaaaagtacaaaaattagccaggcgtgttgacgggcgcctgtaatcccagcttctcaggaggctgaggcaggagaatcgcttgaacccgagaggtggaggttgcagtgagccgagattgcaccattgccctccagcctgggcaacaagagcgagaaaaaaaaaaaaagataatttgaaggaaatctaatttatattattcgctacatgtcctatatatatttgggaataaacttggtataaataaataagcatttcatataccagtaatgatcacaattaaaaaatatatcttacaaggcattgtgtagctgtcctaaatcttcttctttgtctaaaaaatcagtctactccactcgtatcttatatttttaaataaatctacaccatggagagtgtatttgctatagacaataatactgctttcttgttctcaggagtgaacactgagttgtcttgtgtgtgatatggtttgacttgttacactgttgtgcagtcttaataataattaccatgatctttaatgataacaattcttaatgagtattattattgttaataaggattatatttaataattacacccaatacttattatctttaataataataattagcacatgggaaccagttgcaccattgtattatctttagaacaaatacctcaatctgtaacccagtagtttgcagagtatctgctcccacccttggctttccagatcagagtgagtcaggaggcttctagggttgaggccacagggagggggttctggaaaactcctatgcattctatgtgtcaggggccatactcccatctagtcatttcacacagaggtcttctttttgttgtgaagtaccttcaccatgaccatgtgactttctacctcccccgtctgcctactcacccagtcttcataagttttaatttttcttgcacaaaaagaagacccataacatactaatttgtgtgaattacattaggcagggtccatgtttattacttgtatgttggtaaaactttgatcttcttctgccttggttatgtttagatttaagtgcctgtatgacttttttaaaaataaaaaaaaagtttaaaaaaatctttggtgaattaaacattttttagcttttcacactttgatacaaagcagagaaatatttcagtgacaacagatttcaacagattttcaactagactaatttgctttattctttagggtagtttacttattttctctgaaaacacaagaaaagatactccctttccagtaactgatgttaatgtataaaataattttacataggcaaacttttgtatttggatgcatattttgacataaatgtaaattaagatgtttatgatcatgttattttcaggctagttgataacctatttactaggatttaaaaaaacaacagcacgtaagagggacttattttaaatttctattgactttattatattcacataacagcttaggccttaaaatcaataccaccttagtaggaaggagctggaagctttgaaatatatttccagacaagagaaatatattacttttacacgtaaaagtaatatatttaaagagaaatatattacttttacgtgtaaaagtaatatatttattacaactggaagctttgaaatagatttttagacaagagcagatctgatctgaaaatactagtgctgatagttaatgataaaactatagacattaaaagattcgagtgtctgtgtggtcaccttcatctcacctatgtaccaggacacctctaattggtgaaaatgacgggaatctaagggcttctgccactgccctgggcaattctgtaataatagagggggaaaacccacagctttccattagacctatatgactaagaggcttgtttaatctaaaccactgtcgatcacagatgactgacttttataactgttgcttcccttctcatcgtggtgactgagatttgctttttaatgtttgtgttttgctcttgaattttgtcccttcaggtttgatgattcctgtcttttgtgtcgtggagcagttggacggctctcttgaatatgacaacagagaagaacacgccgagtttgtcctggtgcggaaagatgtgctttttagccagctggtggagactgcgctcctggccctggggtattctcacagctctgcggcccaggcccaaggtattaatgcctctcccctctcctcccaagtctcttgtgtgtcataatttgaggaagaatatgttttctgaaatagttctccaaacaaaggttgaaggagaattgtcagatttagcatttcctagtgagcagtagaatatttcttgtagaaggtcttgtttcttgttttgggaagcatttgaccagcacttctggagccacaaaatcaacttgcatttcaaaccgatcatagatttttttgcatttataacactgttattttctctaagttaggaccaatgttgagatatttaactcctgacttatccaaacttataatacatgacttataaagcattcagttttccaaatttatttattgctttgggcctgtggcttctgcactttgcaataagcttttaattaaacagaaaaaaaaatggatgtcttttatccttttgtttctttgaaaactgttttgtagttttgatgcagtccatttagttaaaaaatattgccatgtctttatgatcaattcctttcacttatttgattaaatattaaaattgcatcattatttcagtgcgtattgtacaatactggggagcccgttgtgagcttctgttgtttcattttgaagtatagcccattgttctgtcatgccaaagaattgacaaaacaaataataacaaaaattctccccaaaccttgagtgatgaaaaaaaaaaattgatctgatggaatttattgttcttgtttttcagctgaaatggttgaattgtattgtttatgattatggttataaccaaaggagagaaatccgtaacttccagatcttagtttatatgttagtgtcctgtattactatctttagttaacatttgtgaagatgccaaggatgtttgttattttttaaaatgagtttctcttcatataattcctaagaactatcagtcagagcctcatttgtaccaataaggatactatgagagattaaacattgatataaagttacagatgtggtgaccaagggatttaaattcccaagctcttgaatttgattctgtaagtagatgattgctttttaggaaatattttaagtatttaagttatactttagttctatcaagaaagcaacctaattgaaattaggaatgttttcccagggcaggtagtaccctactagttattgtgaatcccagcgcagtctgaatctgagcgctggccaggctgggcgcagtgatatagctgaatcgtagagtccagtgctttcaaagcagcctgataaaggatgattcatttcctttttccaacgactttccttcttgtgtgagggattcacgatttgatcctgagcaaattgcatactgggcaccattgcttttatgtcatgctatgtacttaaatgaaataaaagaatctcccttcccttccccccacaaacttttcatgccactttagggatatttttctctgaatgtaaaggtcattgtatcccactgcttgcaccctggtgtgccagcttcctgtttgacagggccatccatctcagttagcacagccgttcagcgcgtcgcgagctcacatgtggaacacagagcactaagtggccaagatttgattcttggcacatactgagggaaggggctctcaggaaatttgcactagggagccacactattcctttcagggatttggactaagaattctactcaccaaggtgagatatatgagcaaataaatgtcatctacagtggaggattattaaacagggaacaagtcaaaagtgattatttgcgtcctcaaagtttttgaatattaaggctaaaatgctaaatattctactatttataagttgaatcaatattcttaaggtgctctagagtacagatatactttattttataggtaagcaaagattttatcactcagtctcgtactgtaatctcacaaagaaaaaaatcagtttgttttaaattaggctgctgatctgtgttttggggaaatggaaaaacttagaattgtttactttgaaataaatatattagatcattgtcttcattcagatcattaaaagtatgctgtttgctgcgtgtttattgtagaccaaatagtatgcatgataagacaggtaattcatatgctggataaacagcagcgtgtgaaaaagatagaaaaggaggtagaacaaaatatgacttttgatgactgaaggcatgaagttttatgggggtagttttttgttcatttttgtttgactttgttgattgtttcatgtttatgtaattcctccaagatgaggacttgagggacttcctggcaaatccatttaaagcagagaaatggcagtattcttgaatctctttttcctatgctggaaaagttgggcagaactaaactgcaaggatagtgggttgctttagccatcttaaaaatcaagactcttgaaatatgatttttcattttgatgtgaccagaaaagagtgtcagtaattgagttggaagagtatttcagattgcctgtaaaggaggagatacgttagcaatgtcattatttggaatagtcctcaagtcccaatgacagggcagcaggtccatgatcttgtgaacataggatagtcagtttctttttctcagagggtattccctccaggtgagttgaatttttattaagaaagaatatttcctcctaaagaatgatagaaattctactaaaatggagtttagggatttctttccctgtgttaaaataacctttatttgaaggctagatattagtacctaagagagaatagtgtaaaagatactgtcataaaccatggtaactgtgtttctagctgacccataacctccatttcccaacacacattctgttaactctgattctcaaggatatgaaatgcaggattcatcagacttgctgttttgcatatgtagaaagccgaaagctggcaggccctttgcttctaccagaatagctggactgaggtctaatgaatggcaagcatactttatactatatgtatgatgggccgtgagtacacgtctctgcattgaaagtcttttgaaagaggcatgttaatccagggtactgctgctattctgggaactgccccactctcccaacttaaaactcaccacttcctttactattctttcttctttccttttcatcctttcagttcttccccataaggcttttggcagtagccatggagctccccacactgtccagagatttctggagtccactggttgagtagctattcattcatattggcagtgtgaatggtgggctttgggaggcagccgtgatggcaaggtaatgcctcactgtgcttgtttgatttaatttgtaagtgggcattttatctctcccctactttctgttaattttaaaataaattttaaaattgactgttgattaatttaattaattaatttatttcgagacggagtctcgctctgtcacccaggctggagtgcaggggcacgatcttggctcactgcaacctctgcctgccggtttcaggcgattctcctgccttaggctcccaaatagctgggattacaggcgcctgccaccaagcctggctaatttttgtatttttagtaaagatggggtttcaccatgttggccaggctggtcttgaactcctgacctcaggtgatccgcccacctcggcctcccaaagtgttgggattacaggcgtgagcctccgtgcctggccgacaattttattttaaaacaaacgtgcttagcaaataagcaaaaatcctttctgactggattttttttaaggtcaaaattatatgtttaagaaggggtatattaattgtcactgtttcttatttatattggagtaattacattcatgcagtcatttaaataatgtttctaaaacacagaaaaggtgtctttaataaatgttatgtgaatcaagcagggtgccaagtacattctcagtgatataaaattccacatatatgcatggaagaaggatgaaggcaatgtattagaataatcagcagagtaggtgatgggattatgtgggattttcttctttttctaataaaaaaagtaaatatcaaattttacttccttcatgaattctttgaataaatgggaagataattatgtcttattccccaattttgataagctgttcacttcatccctaatttatccacaaatgtgaaaatttatacatgatacagatgtatttctgttttttcagtggaagattaaaaaaagaatcaataaatcgttaatgagcccctgtaatgtataaaccaagggatttcttagagttggtttttttctttctttctttcttttttttttttttttttgagacagagtcttgatgtgtatcccaggctgcagtgcattggcacaatcatagcttactgcagccttgaacttttgggttcaagcaatcttcctgcctcagcctcctgagtagctgggtggccatgccaccatgcccagcctaatttttactttattttttgtagagacgaagtatccttatgttgcctcaggtgattctcctgcttcagcctcccaaagtggtgggattaaaggtgtgagccactatacccaggcaattcttagagctttaatataatgcatggtaacaactgagcaattactatatgttgagcactattctaagagatttacatgtactaactcatttaattctcataacagacttttgaagtaagttatacatttcccgtttcacagaagaggaaactgaggcaaagaaaggtaggggagtaattttcccagaggcgcaggctagtgggtggaagagctgaaatctgaagtccattgatctatctctagagtcaaggtccttaaccacacagccgtcctgtgaacagtttgattgccagcacttgctctttacttttggacataagccctaaaaggtaggactttttggattaggtggttactaaatacatgctgattatatatatttgataatgatgtttatatatttcatttctttgatgaaatatatagatacttttttgaagtaacagagacagacttcattaaaatttaaaagcaaacaaaaagccaaacctcatggaattgtcatgtactgaagccaacttctaaaactaaatacttgtagagggcctatagtaggttgagcatttcaaatacataattcttgcttatgtgaccaaaatgagtcctgatacaaaaatagaacatattcctaatctagaagtttcttatcaaacttacaaatgttttgtcagtgttgatctgaacctcatctgcttgaaggcattgttatgtagaaagcagaatttccatctatgaactggaaacaatgacaaaaataaaaaagatttgaaaccaaaataccaaggatatttttataaaaaatgaatgcctttattattatcactttattattcatttattatatatttttcaatgtactatctctttacaatgtactattgggaagatctttacatagaggctactttcaaggacaattttattgttagaaatgaatattctttcagtttaaattgttcagtgtttgaaatgctctgctcttaaattctctaaaatcattttttatggaaacatgcaacatatacaaattcgagagacttgtgtattaaatattcatgaactcctcatctaggatcaacaattagaaattcatggccaatcctgtctcgtctctttccctacccacttctcaccccctcccccactggattatttcaaagtatatcttagatattatattttatccataatattttaataaatatctctaaaagataaagactatcttagaaaacataaaccacaatactgtcataactcctaaaaaaagataattctttaatttcacattcagtaaagattcaaattttcttaatcattttgtaattttttttttagtgttgccttattcaaattaggagccatacaaatctataaattgcacttggttgatgtgtcccttaattttttttttgaatctatgggttatctattctttcacacttaaaaaaattcttttctgaaacttaggtttgctgctttaattcagaatttttgtttgctaaacttaatgaaaatcctagtcctataaattccttcaaatactatgattttaaataaacaattagtggctgtgcacgatgactcattcctgtaatcccagcagtttgggaggctgaggtgggcagatcccttgaggtcaggggtttgagaccagtctggtgaacatggcaaaaccccgtctctactaaaaatacaaaaattagccaggcatggtggcaggtgcctataatcaattccagctatgcgggaggctgaggcaggagaatcacttgaacccaggaggtggaggttgcagtgagccaagattgtgatagtgccactgcactccatcctgggcgacagagaaagactctgtctctaaataaatagatagatgtctctaaataaatagatgtctctaaataaagactctgtctctaaataaataaatagatggacagtcagataattagtaagtgcagtcataattttggaaaggaattcagaaattcacctttttttctttttctttctttctttttcttttcttttctttttttttttttttttttgagagagaatggttaaaagatatatgttgtctggagtcaaaaggtttttcatgctctgaaagtttgacattttccctattgaaaatgtttaaaatggttcaggcgtggtggctgacacttgtaatcccagcactttgggaggccaaggcgggtggagcacctgagctcaggagtttgagaccagcctggccaacatgaccagatggccaaaccccgtctctactaaaaatacaaaaattagccaggcacagtggcgcacacctgtaatcccagctactgtggaggctgaggcaggagaatcacttgaacccgggaggaggaggttatagtgagctgagattgtgccactgcactgtagtctgggcaacagagcaagactgcatctcaaaaataaataaataaataaaaaagaagaaagcttttaaaatggtttaatcttgtcttgctttctctatttcttcctttcactctctctcttttctctactttttcttctttaaacactaaatgtttgggagactttcagcagttttttctttgtaagggcaatgttgaaaaaatatacgtatttagacattttaggccttagagctaacttttaacagacacgctgctttttaaaaaattctgtggctctctaaagagagctgaaaatgctaccccaaattgctgttaaccatgtctcagccctcattagagctggataggccgcaatgtaaaacactatttggagaacacaattcttcaacagaccccatgctttgtcctcctctgctatataaaattaaatattcatacatatgtgtgtgtgcacatatgcatgttcatatgcacacagtgaaacctgaaatactaattaaatgccagcggtaaaataatgctcaccttatttcctcatcccaatacatagttaagattgaatatctaatataatatttatagttctgtattccttatatttgtttatgttggcataaatatgtatttaacatatatagatatataattatggctcacatgaaggtcagctgatggaaatattgtttatatgttaatttgtagagggtgaagactctaacttgattttcgggatacctagcagttgactaggtagtgcttgggggtaaaagctgttgagggcaagaaatgaatgtgcgatctcactttacctctgaccttgaattttctacttgaatgcccactaaaaaaagtcctatcagtggaaataattcatttaaaaatgtagcttattatttcctccatgatgaggaaagtatttagcagtgttttcagttatctgttttgcttgggatgataggccatggtagcaattaactttgatatattttttaaactgcctaaagtccttcttctccagagcttaggcattaatgcccatgacctggaagggactggtcatctgagacattcacgtaaaatgatccaggttaaacagactgacctacagatatatacaacctttatttaataattaaggtatgtctcattaaaatatataacttctaggagtttcaagtgtgaaacctacaagcctaaaatttgtggtactctgatatgatatatatcatgtttaattttttgttctgctcccctttaaagcataactgtcttttactaacttatagattttaaatgtaaaatagagttgtttgctgaatagctaggtttgtttgtggtttaagaagatgtagtacagatttcattcaaggaactcatttggtaaaaaacacattcgttaaagcacttaaatttttcaatagtgctgttacttttttgatatattctttacatttaaacttgtccattgatataactcctagttttgatgctataccattattttccaactctaagtaaagtctattttggcattcataatggacagtaaaaaagtcttggccatagagcattttgtaatattaaaatgctttttaagaaattccctgcttcctattttgtctttttttcctttggaaaagatttctcatcatctgaatcttataatttcagttatttgcaaaattgtgaaatttcagaattgtaggtctttcacttcatatgttagtatatattttacattttaatactttgtccagattttctttgatacagtgttattatatttttacattcctatgggatcccagttccataactattcatttatttctgtagtattaagtgttcaatttatttattacttagttcaaatagcttagcatataagtgggacccagagctgtcggggacttcctttgtttacagtatgacagaagaagagctcggtggtggttttgagaggcaggagtgaaaagtgagcattctgctggctgtttggtcacagttgggcaccttaggttggtttcctaggtgccagatagattttgcgtgactgtgatgagcatttaaaacccagcactttgaaatgcaggtttcttttgatggcagctttgagagctgtaaagggtcttaagtcaaggctgtagagcacgtgccacttgcttgctcaaaagcagtatttggcaaaattatttgtatgtcaatgagagaaaacacaaaggttcttcctctatctgtctgcctctttttggtttgaagaaatatcactcaggacagaacagcaaatctgtgctactattttacaagcttgttactcaagttggaaaagatcgctgtgggctatatgcaaatcagacagcgcagaggtccccctcagcttccaggttgcgctcagcagagagatgcttccaagatactctttctgtcagttttataaatcagagaataggatgctgaaaatctcctagaacatttaaaaccttggccttcaatgatttggctgctcaggtctaataatctccctggtaaaagcctaccatcatgggagctgagctaagagggcagcctgttcttgattgaaagccctcaccagcctcaccaacttcaaatggtggttcttcttgagaatctatgctccagagccatggtaataaatagcaattctaaatgtcttgttttattactatgaatacggtgattccttaagggggtgaagagacttctttaaagggggcctatgttagataatctgcaatgaaagatatatcagaagtgcatgaaaaaaatctttccatgcatacatttttccatgcacttctgatatatctttctttaaagattttaaaattaagatctttagtcttttgagcactattgaaagataggtggttgaattttaccactcttactttgcagaaaggaaagctaagaaactttaaaagagcacacctggaggctgtggttctctagcatcatattttattcactcatttaacaaatatttttcaagtgtctattatgtgttagatgttgttctaggtgttgagacacagcaaagaaccaaatacataatgtctctgccctcaagatacttacattcttatatgtaggggagatggaaaataagcaactcaatatgtaataaaatgttaggtaggacctaacattatattatgcttattttgatcctcttctctccatttcgtctagaactagggttttggcaaatatagacttctggaaagaagctgcttaaccagaacaaaatgacaggttttgaatatgttttgaggattaaaactaaaatgattggacacttaaaaggttaaggttcagctgtctgaattatctgaaaaatttacttacatggactaactcatgtttggaataggataaatgtaacattgttacaattagcttatattaagtcatggttttgcttttgtgagggaaattgaagcttttacataatagacatattatggctataataaaatttgttaatatttattgagtgcttcttatataccaggcactgtcctagggcttaacatttactaactcattcaagctcataataaccctgtgaagtacgtaatattattgtccatattttaccaatgaagaggctgaggctcagagaggcaaatagcttgaccaacaccaaaaattggcttcagaaaatgtgtacttaaccaatatcccatttagtggcactgtatttctaatctgtcaattgagtctagaatccaagtgaatagtaattataccttacaggcataaaccgaaggttgacattttcaaattgataacttaatgaagatatgtattttaaaattgagtggggagcttgttttgagcttaaatgacaaaattgaacttgctatcatggatggcattttataagagcctgttttgttagaccctatttttgtatatttgtatatataagctccttataaacttataaagtttaaatttgttttttctaattataaagtataatacttgttaattacaaaaaaaaaaactaaaaatttttaaaagtagaagacaaaattccctcatgaaccaaccattctagagataaaaataggtaatatttgggttgcttccctttggttatagttctatgcatacttttacgtagtggaggtcagatgtatgcaatattttcacttctagttcttacttaacattataatgtataacttccatagtctatattattaattttaatactacgtaaccgtgaagctttggattttcaaatcaaatgagaaacattagttttctcttgattatctattaatggaaggatttaggaatggtcagtaaattaggaagtgttaagtgcagatactatatacccagcacatgctgggcaatcagagtaatttacgtcaacatttatgtgcagatacagttgttctttgaaaataaatttattttcattgttcattgcaggtgcaaggccagatttttttacaaaaacttttttgacattaatgttcatttggcttgctttcttacctttgtctgtggtaaggagttaagcgtttgtttttaatgtggaagaaggctataaagacattgtgtcaggaaactttagctaattgatttcatattttgtttttgtaattgtcttgttcttacccacattttgttcattttcctctttacaaaacatacacgcagtattgtgcgggttggttactgactgcttactagtttcacgatgacagtcctgtgttaagatgtttctttgcccaggaattaacaactgatgacagtttgtccatttgttagcctctgttttttgctgtgtgcagtaggatggagattttatgaaggagtctttgggggaaactctgaaggaaggtttttttctatgtttgaattgcttgagaacagcccattattggaggtagggaatttgtcgaacaaatcatgaaatctcccatatttgctggagtgatgggttgtaatcctttttgtttgtttgtttctatgggacctcaggtcctgctgggcatggaaaagagataagcatctctctgtctcccttctgtattgtataattctaacgtgacccagcttcttttcatagtctttcttatagcataccaagtatgagatggtcctacctggaacctatttgagtacctactctgaactttttctaatagtgtcattggctccattctgattgtctcccttctgagtgtatttctggagtcatgcggctcatactgaggcctatcctcagatactgggatcgttctcttcctatgtgagtatgttggtagtcccaagatagagaggagtatttgttttcagtaagtatttgcctgggttttcataatagatataattggctagcatttatagaactcaaattatctattaaaatatattcatgtaaccaaaaatatcaatttatgtgaaagaaatattagttatgaaaccaatgtttcataattaaataagtatacaataagtatacaaatgagatatcgatttaacatattacattataatttgctatgttccttttttacatgtgacccccactagatattaaaatgcacccatttgcacttcaaactaatgcaattaagatcatcagttgcttttccatcttattaaggaggaatttcctgttgtggctaatgacaagattatgaatttgtctgagtctcttggcagatattaatttaaccatgtaaattaaaaggaataggcccaaccctgctgtaaatcaggggattaaaacatttggggtggcacattctaccaggagactgaggtgtcacttagtactcaataagggatgctggccacattgtcttggagttccctaaaataaccaatttttcatccaaacaagcacccaccagtaggatgtttttttctcatctcctattggaatgccttaagacatagtctcactagattcttatgtccatttagtcctaaaaacaagaaaaaaggagtggtatgggtattgttgctaatgataatgctaggaaacatagagcttactatgtgtgaggcactgttctaagtgtgttacacatcttaaatcatttaatgttcgcaaacctcgtgtggcataagcataattatcttcatttaacagctgaggaaactgaggcacagatgggctaagtgacataccccagggtacacagcaagtaagtgatggagccaggacctaaatgttcaaacccaggcattctgtttcttgagacagtggcttagccaccacacccctctgcctctctagggcatgattaagacattattgtaatagtgggttatcattaagaatacgaataaaagtccctgtaagtcctgacctaatataactagattaactcattaaaatgctaaatatttctctctcttttcctttatttatttttttcttcagggggtggattgggaggaagggagagaggaagagaacttcaaagacattacaaatgcattctacttaatctgaaatactttgatgcttctggaaaagtgagatgatttaatttcatatataattgcatgaggaattataaattatgttttctgaaatacctatgacatgaaaccacaaaatgaacagataaaactgatttgttctctgacaaatcaagatatatggcggtgttttcattacaagtgccatttgtgcggagggagcagctgagtatgctacaagatgacaggaaccgttcccaggcggcactgctttcacatggacatcccgaggtaatttataacccatgctaaaatttttaaaaaacatgctgtcaagaaagccaaggttgaacttctaaagtcatggaatgcaggtacatctttctaattgaccatctttagcataaacttactccttagaaataagttgttttattctgtggggagaatggattattttcagggcactgggggtgccatttagaaaattctctctcttagtgcgtttaatagtttcctggaagatatgtgttgacttctgctgaagggtaatatattcatagtaaaactgactaaggattctttttacttcccactggcctaaaaacagtgtgttctaggcctctgtggtggtggaaggtgaagactcaaaatctggatgttgtgagttgaagcacttctcaaaggacctgtgtccctaagctgccacagtcatttgtttgtcttgaattttaaaagggctttgaaatgtgtggaaccaaaatagttctgtttgtagtactggtgattctgggaaaacgagagcatggttgtctgtgtgggagagagctgatgtgggtcgattaccagtggcactgtatcgtgttggttttgctctgcagtgatgggtttctcactgagctgcccagaatcactcactcgatgccttttgggatcgatgacatttgatttgtaatgagtgggcaggaatgggagtggagaccagatctttgggtcaaagagggaaaaaaggaactccgtacagcagatcatagtctcttttgcatctgattccagcctgatgaattctcacacacagggggcattattctatataactaagacttgtattagatgctttatgtaatgctttctttttgggtacattttctattacgtgtaacaaaacattgactgaaagtgtttatttaataagagttaaaatttactaaaccaaatcaaacaaatcgaattgttcaaaaatgtttggatgtagaagcaaaccacgttaagatttgaaaataaattcacattttacattagtttttaaaataaaactaataaactaataaaatgtgaaaaaatttcacattttatattagtttttaaaataatttccttttaattttgaatatagtgaaacgtagatggtgaagaacaaattgattgactagtttctttcccctaagaagtggataagcaattgatcacgatgacttcgctcacttaacagatcgttggccctctagttctgtgtcttttacaatctggttctgactgagggcattgtagtatagtgcagtggttaggcgttgtggactctgactgccgggcctttcatcttggtgctccccacttcccagctctgcgattctctgcctcagtttcctcttctatgaaatcagggtagtaattataattcccccttgtagggttgttaggaagattaaatgaaacaatccaaataaagtgctttacattgcccttgacacagggtaagggctgaatcatgttagttgctattatgattccagttgttgttattattactttacaatgcagaagccagatacagtgtgtcaatttcttttgttttctgtagcttcaattcatatgagcccttattctgagatactggatgtgaagtaccaatcttaaattttcttaaggtataggtagactaggtcttctggtattcatgtttttaaattgacaatatcctattccatgactgcatcaacttagaagaatgttattttcttttttgtggataagttgttctgcactacattgcttctttccccttttcttcagagtacttaaatatttacacaggctgacaatataataaaacttccacccccatcatctggttaaaattgtgtattttaaacaatgaaatatccttaactaatgacaaatgaaactttaaatattcactgatagctttgtaattagtgagttatagtcttgggacaaattttttttctgttccttggtttttcttcttaaagttctaaatattgagttacctcagtacaaatgcagcttgactacagtgaagccattttatttaatccaactcttcccacagtcgtgttgagaagacagatgattttcccttccattcctcctctgaaatagttgctcatatcttttctcttcttctcaagtggttccacttgtggaactgcctcaaagcacatctgggactatgtggagcagaagggatgtaaatgatttcctctggggatgcgttgtcagtaggtatttgtatgctggaaaatttgaatgtaatgagaactgaacttgtcacccttgaatcatggttcctttttatcctctctcctagagcatttcacaggaggtagcttcatgccgaattatattattttggtgcacttttacctggcctaaatgatcatggcttaaaaaaaaaaagtaaatggtgatatttatatgatttaagcgcacagcacacctaaagacagcaggtcatgttattttatttatttttttttgtgagtgtgtgtgtgtgtgtgtgtgtgtgtgtgtgtgtgagagacggagtctcactctgtcccccaggccggagtgcagtggcgtgatctccgctcactgcaagctccgcctcccgggttcacgccattctcctgcctcagcctccggagtagctgggaccacaggcacctgccaccatacctggctaatattttgtatttttagtagagatagggtttcaccatgttagccaggatggtctcgatctcctgacctcatgatccgcctgcttcagcctcccaaagtgctgggattacaggtgtgagtcaccgcacttggcccatgttatgttatagtcagttgtgttccagcataatgaaattagcctgtaaacaaggcagtaagaaatgacatggaggggaattcaaaagtagtagtttaatttattctgatttattgactttttcttcacctctccagtcttctactttactgtttctctcccttttgttagtatttaaacccctcctgtcttcctgatttttgagcagattctattcttaaagaaaattaaacatgaattacctgtggtaaacatagcatttgaagaagacctctctcctgccaactagtagatgtgtggtcctcctgtgtttttggtgtgtgtttattttaatattagaattaccaactgaaagccaataatactctaagaaaagtgtaattacgaaggtaaatctgtatcaaaaattgtgtggtgtacctcaaggtcaaatataattattagtggatagtctgtttgataattacccattcatagatttgtacataatgttttcaaaattgtatatttttaaaattcattcagtttcctacaaagtataatccactagatcataaacaaaataacctcctttggtataatagaaccacacctgtatggaaataactgtaacactctaaaatagaaatataatagtccttgtgcgaaataatgtaatgtaacttctgctgagtcttgggtccagtagttctacttttcctttcctttgtactcacccctgctgaggcctatgcctttgacagccacctctctaccctgtggcccttggcagtggcagtggcagtgagggcaatgatgatgctacaagttggcacacaggcttggtggggctgaggacaaccttacagagaaggacagctcacatggagtgttactggccctggaggatactcgcagaagtcttggagagcagggtggagcatcatgccaggaaagagaagggctgggccaggagggtcacagtgcaggtgccccagatctagcttctaatcgtagagctttgcgtggccacagtagacccttgtgggaaggcattagagaggtgatgggccacgggtcactcaccaggcacaacctcattggataaatcagggatttagttatttaatcaaacttctgatgaatgaagtattcacttttccatcaaattaaatagctcatctgcagtattctaatgtaatttggatatccatatatgttatcttaatgtaaactcagttatgttttatccaggatgcactattggtattaaattcttcttatagcaatacaattttaaacatgatattatacatagcagctaataagttaaaacaatactatatagcactttaaatgatttatatggctaatgattagcaatttattcttggagatttatactaatttatgacttggtctccatttcaattaattgtgtacaacagttactttgttttagtcattttgaatggttatttctttgagaccatggccactggtcagataacaagcttacaactattctcttcctgaagataacttcttccttttgggcttgtagtcacacatatgtgaagtatgtgttataagtctgtactgtgaaggatagagcgtttcttgcttcaggtcctatattttaatacgcacataattgtggtgctcattcttatgttgttttgtgttttaggttgtatttaaattacatattctctgttgcactcattctataaacttttccttcttttattttccccgatgttttgcaacctgaacttcatgcttcttcagtgctgcatgtggggtggcctttgctttatgggaagactgccgttttgccttgtcctggctctctgtcacagcctgctgcccattcaccccctcttaccacgtgccagtgatcattcctggagggacaagtgttgcagtcagatcccagtgagaccttgctcccagtcgttgttttgtttgtgatccttggggagaagagtgaccagctataggcttttctgaagaagatgccacatggtgcttcgaaaggaaaggcttttgcagactggggcccgtgacaagcaggaaaggctggcaccggagtcttgagtgagcgctttgacacaccgagtcacagcccattatcacttgttctggtgtcaaaacaatacagcaatttgaactgcagctcagctcactcctgctgtcacacaagctccctcctaagtcattagagtgctggcatggactctttccggatcagtcagagatgcattaggagaggggtatgtatttattaattcaatttaataagtgactattaatcatctgctgtgtattgggcattgccctggtggggggtggatggggaaagaggagagttcccgtaccagtacaacaagatccctgacctgaaggtgcccttgcctacgagagcacacaagtaccgtggctatcatgaagacaaaattgctttgaaaattcaaaagagggagaaatctcatcagattggaaggatcagtttagatggatgagggaggtgatgtgtgagaggggccttgacaagactgcaagattttgatgggcagagagaaggtgagacagacagttggcagtgaattctgcttggctggtatgcaggatatgtttaagaggtatcagaacttgaatctattgtaaagtaccttggatgccaaactaaaaagttaatgttttatttagtggtctcctgcttgagaccaccactgaaagggtttgagtcagtggagtgacatgttaggaatatgtcagtccttattaaaatgttagcttaggtattaatcatttaagattgcaagtgactatatgtagcagaaactcttcaacagcggcttaaccaaacaggagttttatttgtctcgtgtaggtgtccagtgcagcatcttcacaatgccgccagggacctgggctctggctatcttctggcatctcttagattgaaaaatggctgctggatctccagatacccagttgagattccaggcaggaagagggtagggaaagaagagcagaaggccaaatgcctctcgtgaagctctgcctttattattctggaatggacagccttccttaagactttgtctttatctcagtctcaggactagagagcctgggaaatcaagttttttatttgacacaatgctgctcagaaaaaaaaaaaaaaaagcgactctctagtaggaaaagtggacattgggtaggtaaggagcactgttggccacagcttatttgtgaatctatcatgggaaatcagagaaggcagagagcagaggggcagaaagctaacagtgccagcaaggagtcctgattagattcagagaaaataatctcagagagcagtctccattttaggtttgtttaatgaaagaatatgggacactgagttaggaaaaccaggctttagctccggcatcattattaaacatgcatgtgttgagagaagctacttctttgaacctcagttttcttatctataaaattggggacttcaaagcctgtaagccaaaagctgtgatgctaagaaaagattacatatgtgcttcggagtactattttcagattaaacactgagtaagttacaaaaataaacatatagattatgagaagatatacattttattaaaaaatgttttctcctaatttgaggaaccaaagaactagcaaacatatttcatgtattaatttgaaatatattagctaaaaaaaattctgtaatattccttggcactggtgttttctgttaccaactaaacagtacttgcatttatttactgtaaaagaaataagagataacagattcatccctaagcccctgctctaacaggattatttatgatgtgacaacttattacactcctttcctgataaatagttagctacattctccatggattttacagtttcatctggggcagtttgttccctacaaagtgaagatacacagtttttatttctcatctgtgacttgtccccattagggaggtttttttgtttgtttgttttttgttttttgttttttttttacctgatttccttctcaaatcattgtgataaaagactggttcatatgtgtccacattgttttaatatggagggagatacaaagaaatagaaaatatgaccactacctttgggggacttattacctagttggggagagaagacaaagacacataggaaaaataaagaacagcacagaagacaaagtaatgccatgctgaagcagacgctttagtctttgtgtgctgtgcattcaggaggggcgtgtggtgaggggttccttcccctgcccaagggcagcctctctccttgctccttccattgctgactctctcagctttatttggggttatgcttcatcatttgtccccagaattcttgtatcttctatttctcactcttcattggcttcttctgtttgtaatacagaagtgctcagtcaggactactgcagacaaaaccaggaattcttagtatttgcttcctgactgaggctaccaccatattttatatcctccttgttaaatattttccaagtatgcatcactgtgtccttacaatctagctctcatttgcttcaaatagcttcacactccccagtcaacagtgcttttctattcatcagattttgggcctggcagtcaggctctggtcttccttttcattcccttcaaccatgtgactcctcgcactccccaccctccttcagagctgaattttctgtagtttgtcagatgccccatattttttcttgaatctctgtccttaggcgttttctgaaatgcttccccctcttcagttcacctgagaaacttaagattcaattacaattgaggttatcagcctgggagaatcatccccttatcccactgttcaccaaatagcattagttactttcttctttatgcccctataacacttatctttgtaacagttgttaacacagtgggttatcatttatctgtttacttatctcttttctccctgttctgtgagttgttctagtctaggaactagtcctgtccacacctatgacttgccatacagtccagactgcactataaccattatagtggtgaaagcactagctttggagtcacacagtagggatttataccttgactctgtcacttgcttgttttgtgacattgggtgtgtatgttgacctccatgaacttcagtttatctgtaaataaaaataacatctaccctcataatgttgtgaggagaaaatgacatccaaacaatgttcatagcatagttcctagaacatggtaggtattcatattaaaatagtattcgttgaaaaaatgttaataaatagagcaatagtcatttagtggtaatactctctccctctttttcacttcttgtttgaaggtagatataagcaaggaaagttaagggggatcgtcatgcatagatgtacttggcgagtttctggatggtacattctgcttgtaaggatggagttaagttttaagtgagagtgggaggacaaagaggtgaattttttttttttttcttttttctggacatagtgacttggaaagaacccgtcacaggtggcaaaggaagctttgttagagaatgaaaatggaatgtatgtggcagaggagagtaaatgattcagtgtgatttgtatttgatacatagtagtattgtccaaatgagatccttatcataagaaagaaactacccaagattaataaatgccatgtattagcaattactacttgggcttctttaattaggaaaaaaaaattccaggtgtctgtgatcactaatggagctttacaagtaagaggcagaagggaattttatggttttaaaaaaaactttatttttatatttacaaaggtgaatgtaaatgtcttaccagaccataaatgtatgttttgatctacttttacactattagctgcttagttataataggaaaattcatcataggttttaacacttgcttttatgatacccttatgatgtcattcctgtgtagtacattgcattaaaaaatagagtgaccaccctgagcagactgttaaaataatggagcattcattcttcttgaactgcaatctaaatattccataaagttatagtagcgtgcgctgggagggcaacatttcagagttgtggtctcacctcaagattggagattggtaaagacattaattgccagcattctttgttcaattttttgcgaagaagcaaggtttgcagatgatactggaaaatatggagttctgatcaacgaggcacaaatgtactcctgttctaattgtgaagttatctgtactgaggaataggtgatcagtaatatcagtttaactcaaataccaattgagacaagaagactctccccgaggaacaatgactcattttacaatgtggccacagaatttagcacacagaatttagctgggttcatcccagctgcctcaaatatcattaaactaatctcagagtctaggattagatgtggctgacccaagcgtcctttcaggtcagagttcaaggagttctgcttaagtttctgtgaggaggagcagagagaagaatctgtgcccgatattcctttaaacaaaggttttattctgtagtgcttttaagatccctcaaatagcctcaactactaaactaacacacacagaaaaaggcagtttgtgatctctagaatagtctgtttgcacaggttattaatcactctgggctgtgatgtacacagaccaaaagaaagaaaaaaagtcagtgatggtggggggcagtgatggagtgatggggagccatgttgaacttcctcccttcctcattctttgttgatttgtaattaaatccagacttagcaggagtatcattacattgtgaagatgagctggaaactcttttcaagttaaatttcttaacattatcccctgcagtaggaagggcattcacactgtgaccaatctttaaaaacaaaacaatgctaaatagtgcttgcatatttcaagtaaagattcctccttcagaaagacttggcatttgttgtaagtggtgttatgacaccatggtatagaaaacaaaaaaaaacaaaaaaaaacaaaaaaaacttgtcttggttttttttaaagtaaggcgttgaaaatataaagtaggcagtatactttagccatgataaaaatgttaattcaccatcttgtccatggaaaaagctattccttcagtgaagtcgtattaactatgcaatatcttacagccaagtattgctctagaaaatgttggaggtttgcggccgggcgcagtggcttacgcctgtaatcccagcactttgggaggccaaggcgggaggatcacctgaggtccggagttcgggaccagcctgaccgacatggagaaaccctgtctctactaaaaatacaaaattagccgggcgtggtggcacatgcctgtaattccagctactcaggaaggctgaggcaggagaattgcttgaacccgggaggcggaggttgtggtgagctgagatggtgccattgtactctagcctgcacaacaagagtgaaactccgtctcaaaaaaaaaaaaaaaaaaagaaaagaaaaaagaaaatgttggagctttgcacatgatctaaattcagctttctaattattatttaatttctgttttatatcatcataccctcccgtctactgaagtatagatcaccattaaaataacatagctgagtagtgtataggagtgtctgtgaaaaagagaaaaactagatggctgttgggattatcgtagagccataaaacataattaatatatcttttcccactccctcattatgttcagtgctctcctccatgacttccctggtagagcttgatccagccttcacttagctacttccagagatgaggagctcactttttggtgaggctgtagacatcaccatttgctcttgttttactatttctagggattataaaggaaatcatcttgaaagtatattgatatagttctttttctacaactcagatatttggaaactaagatcatgccctccctaagactctatttttttttttttttgtggactaaacaaccacaggagtctttgtatacatttggtctcttttctctcctttcatgttgtattaagttgttgcaaaagtaattgcggtttttaccctttcaatggcaaaaatcgcaattacttttgcaccaagctagtatatcccccttgtatctggttgctcatggtccctctgacacgaacttatctcattacctcattgtggtcttgactttctataaatgcattagtttgttttagcagatgttcacaatagtggcttatattaagtcacctcaatgtaatagtttgtcttgtttttgtttcctatttcacataaatttatgcaaggtcaaaaattatgtgtatacatatataattttaaaaataatttaatacattcttattccgttttatatagtcaagtgttatagcccatccttttgaatctaaatcatattatcaactatattaaccttgcaaaatctacagattttataagcgtcttcacccaaatcattggtaaaatgttgaataggcggggcccacgatagtactcagtgtgtaaccctgaaaaccacctttcaggctattaattttaagattagttattcaacaaggcacaaactatggaactaccctgtcaggtccaaggttatcatgaaaggctttctcacgtatttttgctgttcctataagtctgataaaaggacaggatcatggtttgggattacatctgtggactgaacttttttactttttaatttttgaactttgagtgaaaatattacttgttctggaatttctgtttgttcatgattttatttatttatttatttttaccatcagatatcgcttctatgcattcctcccataccctgggatgtgaatctctaggccagtaggtttatactcatttactgcatccagatgttcttttatgattttattttctatattagctcccagggctttcttagccattgttctagcatttccagtttgaaacttcttttggtctagcagataaaatggaaataggtgggtaattgggtagttttgcctccactttctttatagttttacatgacatcatctcccacagcagttgtcctgtgtttttctagatcatcattgagttcctgacttcacttaataactttgtcaaagttagaggtttcacttatcttagatctcctgggctgtaacctctttgataagattcttagagattcctacttgtttctctgcttcattttcaacaatagttacctagtcttaattaagattatgagataactttcagatcctggcctcacctcttattagggcatctgacctcagggagttacttaacttttctatgtttctttcttttcttctctctcttttttttttttttttttttgggagacaagagtcttgctctgtcacccaggctggagcacagtggtgccatttcagttcactgcaacctctgcctcccgggttcaagtgattctcctacctcagcctcctgataatttttttgtatttttggtagagatgaggtttcaccatgttggccaggttggtcctgaactcctgacctcaagtgatctgcccacctcatcctcccaagatgctgggattacaggtgtgagccgccacacccagccaacttttctatacttcatgtgtaaaataagataagaaccctccttactttaaggcagttttaaggattaattgagatattattttaatgataagtgacattgtacacaatgaatgttactcttattactattatttctcatgatgatgcccacctatcttctttttcataattgtgatcatacgaatatttccacagcttcacaactcttttaaatcatctcccctaacatgatttcatccatggaattacacccatttttttttcagcttttcagtgtcatttcctaaactataaaatacatacgtcctctcagaatgcccttattgtacctttcagaagaagtggtctttggtacctcagagaaacctgtggcttcatgtctctcaaaagtctattcttctgatttaagcccagcatagttcaccttcataaatgtatttattatattatgccttccatgatgagtactataagccagatgactatgggggcagcctgcagctcttagaaggctctgttgaaacctgtttttccagtgggatagattatccgtggaaaatgctgatatttcactgggctttctcacaaagttagatatttcactgtggtttatctcacattgtaaaaatgaaacatattaacatatagggcttggaatttaatagatttagggaaaaataaaaattgtggaaacaaaattataaaactataaggtttcacagtgtttccattttaactttctaccatgtttaggtgtgttaattataaagactctgcctggtttttatctatggtaagcagagaataataataatagaatcatccttttgtgtccagggggattggttccaggactcatttgaatatcaacatatcaaggatgctcaagtccatcttacataaaagggcatagtgtttgcctattacctcctcacctcctcctgtatactttaaataatcatctctagattgcttataatatctaatacaatgtaaatgctatgtaagtgttatactgtatttttatttgtattttatattgttgcattattattatttacttaaaatttttaatccagggttgttgaatctgtgagtctagaacccatggactgaatgaagacccactccacttaccttgacccatgcaatattcatataatcaagcattcctaaatttttggaatttctaaataagaatggatttgagagagtttggccctgaagcttttttatttcttttttttttcttttaaaaaactatgtataaccagaaataagcatgtggagtttgatttctttaccatgaataattgtactgaaatatttctaggacatgttctaagtttacagttatatgtgtgaaggttcagagaacacttttgaggaaactgctttccttttccctgaaaaagtgatagtggtggagtactccccatacaccctcccaaaaaatgcagctccttttctccacccatcatttgcatttgccctccagcctttctctatttccctccagggcacacaccctagtcttgtatttccctgggtcagcctgcttggctggagggtgcttatttaagtgcagattcctgggctcatataaacctagtgaattgggtcccctggtggtagatcccagaatcttcatttttctcaagttctttatgggggagtctcatgtccccaagttttgagaaccaccacttaagtccatttgtcattggcttctattatgtctgatgaaaccaatattatgcagagctctttctgaagtgctttgttgttgaacaggctgctggtgggccagaacagattgtcaccatgtaaatgaggagtcaagggacataattttatgggctcacacctatctcttagccaaagacatttcaggttagttgtttgcctgtactggtaaaggaatatagtctcatttgaactgggacaaccctagttctgggtacattctgtggtattatatttgccaactcacattcagcccatgcatttataattactcaactgtttccatgcattgagtcattgcagaaaagcctcttctttgtagaacctcattaagatttcagctgctaacagattttattttacagttccagctttcatgatattaagatatggagatttgcgcttctgggaggggttatttacaagtttaaagctcttagaagcatcacagtgtttttaagggcataaccagaaaggaaaataaaaagggtagtctggtattctgatcaatgtgatataatactttggaggcaaaaatttaaaatgttgaattgcttttaaaaaattgttacttatttgtgatctgtgtgatttttttctttttttaacagcctttggtttaaaacaatgtttttataaacgttgtttatttttggcttctaaaaagacacataacattaaagcaatactcatagggttcatactttttaaatgaatatactttccttatgctaagaatatatggtaaatgaataatctctgatttaaatgatgcttttttttgcatggttgcactcagaattatactgtgccattttatatcttgtattgttcttccccgtggtatgttaaaacttttaaataatgtgcactattttaattacagtaagtaatcattaactgagagttattggttatatcaattagaggtgccacttatgttttttcttctatctgttaacataataatcattcattaggcactctacagagagaacttaagctaaatgagagcgagtaggtccacatcgggagtcaggagtgctggccgccatgatggctgctttcatgtgaaaggccttgcctcttttcttgacgtgatgttaccactgctttcactgaggagacattggctacatgtcccctttggcagtcatcttgggtatctgagagtcttcctcatccagtgaagttcctccgtacagcgtttagaggcctttcctcttgctttgcccttctttggcatctgcatgtggattatttacttgctcatttgttcctggtgtctttgcattacctactctttctccagccaggaataataaacaccttattgacagattgacttctgattctctgtgtcctccttgtcaggttgatatcctgccatcccagaaggcactgtgtagatgtttgctaaatagatggttgaatagaagaggacttaatttttgctaaccgaccagattgatttaatttgttggtgttccaatccagccactttgaatatcaaggctttcttgcttaatatccttttaggcaacattataactgttcatgtttctatataaagatttctaaattggagggtttctcatccgaaaatagtcaagaatttatttaaaaaactgagatttctgaatgcaaatagcttcctttttgcatgtaggttgctttgctttatttgcaaggaaagagcagcgatttaaaagtaataaacacacccattgtaggaaatataaaaaatacaaaatgatgtgaaggataaaataaaattcccccttggtgttacctgtgacccaagatatttcttaccttgaaaattttgctgataaagttaaaatctgctttatgcccctcatagtctcttttctttctttccttataggcaattggctatctatatatcttagtttttcacttaatattacaatattatacaatattatacaacaatatacaatattatacaatacaataagtttttcacttaatattacaatattaatcattttgtcatggcattaatttttaatccttttgtaatggctgattgtgtgagtataacataatttacagaaccattctgttggttttacacaggttgtttagaattttaaaaatattatcaataactctttaataaacatttgtgggtgtcattctatgtttttgattcattaactaggataatagacaataattttaaaagtctgcattctatgcctggttgacaaattcatgattgatcttcactgacatttaaggtgttaacactgtcaaatttcagattttaagtttaacttagttttcttgttattacagttaacctggacttagaatatacctgtttcattagaatttgagctggtgaagagcttcattgtcctgattgaaaggtcaaactgagggatttataaagcctgcctgaaatgacaagactgttagatctgagtgttctaagatattcgtcatttaaaacccatagcattgatatttttaaatgtcttattatgaaatatgttctgcttacaaaagaatgtaagtaatgtataatgtatatgtttagtattaaagaataataaaacaaaaacctttgtacctaccactctgcttaggaaagagaacattattagtacctttgaaactttcatgttcccttcaatgcaattgattttttaatgccaaggatctcagtgataatggatcaaatattttattttgttttgaaacggagtcttgctctctcgcctaggctggagtgcagtgctacgatctcgatctcagctcactgcaacctccacctcctgggttcagcgattctcctgcctcagcctttcgggtagctgagactacaggtacctgccaccatgcctggctagataatgtatcaaatctttttttttgagatggagtctcgctctgtcacccaggctggagtgcagtggcgtgatctcagctcactgcaacctccaccttccgggttcaagtgattctcctgcctcagtgtcctgagtagctgggactacaggtgcgcaccactacgcctggctaatttttgtatttttagtagagacggggtttcaccatgttggccaggatggtctcaatctcttgacctcatgatccacccgcctcggcctcccaaagtgctgggattacgggtgtgagccaccgtgcccagccaataatgtatcaaatcttgaggaagatttggaagtgtctgatttttttcacctgtactgcttctacctggtccaggtggccctctcttctcacctggctcactgcaacagcttcctagctggtatctctgccttttacttctgatccacttcagggcagcctcccccagtaacctaaatgatgacttaaatacagaaactaaataatgccatttatctgcctaaaacccttcctgggttttctgtttaatttagagtgaaatacaaatacttgcggtgatctgcaaagctcttcctaatctcttctgatctgcatctgcaacacttactctccaagcttactgccagcctctttgaatttctcagccctgcccagacttcctggttttatgaccatcacacatttttttcccccatatttctgcctagcaccctctttttaccactcttagcaaggcaggttattttattattttttaatcccttgggccattttccctgactacctgattattctttctcataacatcctattattttctttctttctttttgtttttttttttgagacagagtcttgctcggagtgcagtggtgccgtctcagctcactgcaacctccgcctcccgggttcaagcaattctcctgcctcaggctccctagtagctgggagtacaggcacgcaccaccacgcctggctaatctttttttttttgtattttagtagacactgggtttcaccatgttggccaggctggtcttgaattcctgacctcgtagtccgcctgccttggcctcccaaagtgctggtattacaggtgtgagccaccgttcccagcctcatcctattattttcattcctagcacttgttaaatttttaattatatattttcttattggtgagactaagtagacctaagtttcatgagtatagttaccatgtcgatcttgttcaccatcctgtatgtctagcctgggtaaacactccagaaatattgaatgaatgaatgagaaagtttagtgatagagaatattagcatggcacagctttttatgttcaaaagatatatatggtattttgggtccaacaaaatacacctgattgaattagttgagtcaggcctacatccctggacctccttttgcctaccacacctgttatttttaattcttaccgactcatttgtaaaatataaccaatgtaggttaaataatcaattggagatttctcaggtatttaagacagacttaagcagcataatatagaagagatcttggtatagtggaaagaatgtgggctttggagtcaaaaatatgaatttaaatagttacggtgcctgttagctgtgtaatctcgaaaaactgtcccctggtgttctcatctgcaaaatgtcatgataacacctacctcattggtttgttgtgaaaattaaaggatgttaaatcttagctctgtatttgccacaaatagactcttcattcatgatattataatcattgtcttaccattattacgtaagtgcaaatagcaaatagtttcatcatttttttgcttctggtttttgcttcatctctaaaatggggatcttactttaaaggaataatgtgaagattaaatggcataatgtataaatgtgttgatggcacaacacctagtgcaactccacctggctcatagttggccctcaataaatacacatggctaataaaaataacagcataaaagaattggtatcatattacttggtggcaatttggagtctttaaattctaggtattcatttgccaaatatttattggatatctgttttatgccaggtgctaagttcagtgctagagcaacaaggaggtctaagatggagctctattgagtagcctgcattttaatggggaaaggaggtttcacatgaattgtatagtttttcacctcatgagtaaatacaaagtgtggtgcgattaattctcttggagggaataggaaaagtgctattccctctggaagtactgtttgagttgggtctcaaaggctaagcagcattctccagaggataagaagtaccttgttctgaggaagataatatgagttttggagtcaggcagacttggatcccagtgtctgccatttaacatccttgtaaccttaggcaagtcatctattctaacctaaaatggagacattaatatttatattgatgtagtttcagtgttgtccctgcccaaatctcacatggagatataatccccaatgttggaggtggggcctggtagggggtgattggatcttggggtggatttccaacttctgttctctcaatagtgagtgagtgagtgagttaccgtgagatctggttgtttgaaagtgtgtggcacctctccgcttctcttgctcctgctcccatcatgtgagctgcctcgctcctcctttgccgtccccatgaatgtaagtttcctgaggctttcccagaagctgagcagatgccagcaacatgcttcttcctgtacagtctgtggaaccgtgagccaatgaaacttttttctttatagattacccagtctcaggtatttctttgtagcaatgtgaggacagactaatacatatattgtaggatttttgtgaaaattaatacaatgataaagggtctggcatgcagcaagaacttacaaatgcagggtctttgcagtcacttggaaagcacttctctccacactaggaaattacaaaatggctttcactcccaagaattcatagttctatgtctttacctgatcaaacatgaatttcttctactttgtaaaatcttttaaattaaattaaattaaattttatttttctgagacaaggtctggctctgtcacccaggctggagtgcagtggcaggatcttggcccactgcaacctctgcctcccgggctcaggccaccctcccacctcagcctcccgagtagatgggactataggtacacaccaccattcctggctagtgtttatatttttttgtagagatgggattttgtcatgttgctcaggctggtcttgaccttgtgagcttaagcgacctgcccaccttggcctcccaaagtgctgggattacaggcatgagctactgtgcccagcctaaatcttacctgtatctttatctttagaagttcaaagattggctgttcagcaccacttcaaattcagtttattagaagatttacttagctcgtaggagttactctcttacccactgttagaaaaaatagtagtcttcattctgtgagtctttatttttttatttccacacttgtcaaacctggtgaatcttctaagattctaaataagaaatcagtcattttagctctttattattgtgtttactctttgtaacatcaacaataatagtagtttacatttggttaaatgtttaaaacttatagagaacccaaattcatattacctaatttaatgtcctcaaaaaccctttgaggtggaggccatcatcatcttgtttacagataaggagatcgagaggcactgagtgtgggtgacttggtcatctgattctaattcaaaactttatactgtaggggaggaaaaacttaatgttttcttctgccccctagagctattctccacccaggaccctataaattgaatgacaaaagacagattaacaagaggaaaacaaatagaagtttattaacgtgtgcatctgtatctgcttttcaattgtcttcaactcaaaataatcaatatgagaaagagcatattttgggggtatgtattctgctacctgcttttctgttttgcccatctgcagattctgttgttttctccaaggttaccagtgctcatcctctttttgttttttctttctactgcagtagtctttcgttcctgtgtggcccaggttattcagcagttccctatgacccagattctctagtctggaaaacatgtgtctgtttttttattgatagattagtatttcttaatcatgtgttaatagtctacattggcttctcattgccctgagaagcaacttcaggatcctcttaccctcttcccacaaaccactagtcactctttatttcttgttgttaattctaacatcctgacaaggtaaatgaaatgtacttaaaatataacttctttaaggtggaaccatttcacttgtaacattcttttgtcccatagcactctgctaaactactgtctttcaaatatctttctgttttgtttgtttgtttgtttttgagacagtctctctttgtcgcctaggctggagagcagcaaaccctgcctcctggatttaagggatcctcccacctcagcctccggagtagctggaaatccagcagcacgccaccatgcctggcttatttccgtatttttagtagtaatagggtttcactatattggccaggctggtctggaactcctgacctcaagtgaaatgcccacctcggcctcccaaagtactgggattacaggcgtgagccatcgcgcccagccatctttcatatatctttctaaagcaaaaaaagccaaattcttccatcatggtttcctttgggacttctagacctatagtaagtctattttaaaaaattatctgatacacttagctttgtgtgtttattcttttttcccaaattttgtgtggcttatattagttactattcattattgttgagttatttttcagattcactcatacttgaactgaatgactttgattataaattctttggatataaagagcactgtcactttaaattattctgtgaatagcagaagccagtgttgagatgataatggtgatatttaatatactatttttctctattaggcatatcatagatttaacaataattattagatttggagtctctgctagctgcagccttttccgaaattcaaggtatatttctgtgtagcgtatcttcacaaaacataaaaacactaaactgaaattaaaactgatttgaaagtatactagagaggattgtgaatatctatgaaagtacatgactttttttttttttaattaaacatttgtgatctctgcctactccatttcctagcaccttttattttgttattcttctttaggtaaacagccattcaggaagatggtttgtgcaaaaagaatgaaaataaaggcatgaaggaaaatgtatgcactagcatcttctgtctctccctctgagattttatgctctgcttcaaaaaccagtttaaaaataaaaaagatgagggcggttgcaatctgcttcattttatgcagattaggtatggccctcgggtacctgccaaattgctaatatggccttccgttgggcctgattagtgtgaacccggatcttttccattaaagcagaaatgaatttgttgggaataaggtaacaacaaaagtgatattttcactaataaccgtgggtcaggttacattaaagcagtttctcagtgtgtacctgaggcagactaccctcagcatttatgatttcctccatcctcacttggctcctctctgaggacatcgtggtttttagagaccagtgggaccgtgacctccttttataccgaagctactttgagaggtcattttcttctacattccaaatgcaaaatgttattctcatttttgtaaacacatctgtaggccttacacttgtaataacaagtatcttaaattatccagaatgaatgtttatataaggatatccactctgggcaattgaatttttggataattccaatagccattttgagtgcccctgggtgaagcattaattatcttccaaaaagataatggagacaataaatatggaactatcaagcatctcttatgactctattagaatacatttttaagaaaatattttggtaccaatgattgtattttgtgggaaaagaattagaggtttgtatgaactaagcagcaactggaagttcaaaaagacaaattgggccctatctgcagatttgggtgcctaaagacttatacaaagtaaagtcagctttgtcagttgcctaatttagcccatattgaaaatcactggagctttagcacgagcagtgtttcatgtgaagtcattttgtaacccaaattatttcttgcccatggaggagtaagaaacacatttaacagttgacattctgcatcatcatggacagaccagagagagaagtagctacacccaaaatacatacgaaagtcttttacgtgggtttgcttcccattaagtggtttatggatgaataaaatatttatttttaaaggccttattctgatttattagaagcattattgaatatactaccccaacccagtattttgtgtcttcaagtaatttgatagcaagggcaagaattgcaaagcttttgtttcctatttcttaattttatttggcaaagtacaaatcagttaaagctaaaattatctgtcacatagatgtgattggggaagaaatttataatcatttttggactcttacagttcttagaacatcatgtttcaatattattatacaagcatttttttttgagtgtctactaagtgtcagacaccaggctagcttagatgaatgaggtggtttctggttgattatgaccagttttgagatgtgtccaagtgtgcaagaaccacaaactgataaagaaatgttcatgggcattttaacttaacaaaaatttaacttaccttgactcatactggaaactgttatcagaatttaaaaattaatgacttgccctttatttctggtacaaattaattttaatgtaatattgggtaacttggtcaactactttcttctagtgtagcaacataataataccatgataaacttaaatgcccaatttcttgatggattattataaggtgtttatgataaaacacgattgaaccaattaaaaatgagtagaggtaaactggggcccactaaggtgtcatcagtatccaaaggctcatctgtattcagaaaattagacatggcgacagagtgagactccgtctcaaaaaaaaaaagaaaattagacatgaaggaaatcagtcttatcctagtgaatattttcatgcttttctccccatgtattatagaatgtgtatgttaataatgaaagcaaaacaaaataaaacaacatgaaatgagattaaatggatctttttttttctcatttaagttagtggcctgagtgactaaatatattttgatttgtgattttccttccttttagaggtgggaagttgatggtgatatattagaatcaaaatgaaacaccacttaagttattttaaggatggttgaattaaaaaaaatccatatgacagattagctcttgggacccctttgcaggcttttgtctatatttatttatttatttacttattttagaggcagggtctcactctgtcagccccctgagtagctgggactgcaggtacgtgccaccacgcctggctttttatttttatttttatttttgcagagacagggcttctctttatgttgtccagcctggtttccaactcctgggctcaagcaattctcccacctcagcctcccaaagtgttgggattacaggcatgagccacagagcctggcccacagccttttttctaatagaatgtaatagaaatctacagtattagctctcatacagttcttgccatcttcttatctttcttaccgggttttatatcttaaagctctgaataaaagtaaatcttgtcgacatgtggagggtcttcatatatcagtgattcctagggtatttattagtatttataatcagataattttgagatttttgtatcttgctcccaattttcagcatcactcttcctgagcaaattaaatttatttatttatgtggtttatgctatgggcttcattggtcatatacaaatacatctttaagaagaggggattacttatttgtgcaggtatataaactattctattgggtactatgcaaatgcaaaattgatctgagagtatcgtgtcctaatgattgtgttattgtctttcattaacataaaagtgtcctggggaaagttactctttaataattttaacataaagaactaatgaatacaattatatttatttagatagagaagtccattagtagtcagtaggcagcagcttttgttattttaggaagaagtgcagtcggctggatgatattcagtttaaaaaaacctgattgagccatatttttttttcggttgatctgaaagccattgttgttttgctcaccaactggcagaccttcaattatcctgaatttagaagttgtttactatactttgaaattttaaaaatgagcccttcctgagaaacaaaaagctggatgcttgccatttttttttaaagaaaagtagaactttaatggcagaaaaatcaatcaaccaattcaatgttgactttatttccagttttgaagccttagtgtgtttttaaaatgacagtaatcaaagctatcattattaatctccaaagttttggggcatcattttgatctagaatgtcagaactgcaaggggccatggagattatcagtaagtctctgggactgtagtggattccacaagatttggttgagggtttcagctattgaggctcttctctgtgccattatcaggtgtctagaacatctcttgggctagtcttcctggatatccagggtaccaagagtatgggcgctcacttttccatatgttgggggttggcagaatgctggggaagggtctgagagcacaaggtcaacctgcaaagaaagctggcactgcccactggccacggcacagtgacctttcatcccttccagcttcattccctccttccctccttttcttctttccttatctgtgagcctctaccatctgccaggcaccgtgttatctgtggaacttacagtctagtgaagaataaaggtgccaaatatttttaagtgcagaggctctctgggatcatttgtagcagagggtgggtggtccctgatgccttctctgattgcggacactcctacagatggcaaaatggaggttcaaagagaataagtggccccagtcagtaagctaggacaaatttcctatcctagggtcttttggactatgtcagatgacttgccgtgttagcaggtgacattttagaagatccaagtttttgcttctttaagtaaaggcaactttcccttaaaaacatcctaaaaaatgtaatgcttacctcttttatgttgacttacaattcattaatgccaacatatgtttatacaggactttataattttcagtgcactttaactcatgttattttattgtaattaccatcttgtgagtcaggcaggggagtttgtttcttgttttagcttttaactccccattttatagaagagaaaataggggcccagagagggtaagcgagttatccacagatgcagagctgcatccaacagagggcagatccaagatctgggatctcttgattgccaggctgctgctcttcaaacaaaagtgggtatgtgacatacacacacccactgtattttaggcatcctcattttatggggctgtagccagagttgttagaacaagttaaattgacatgacctttgccttttggtggtttatagtctaaatatggtttaaaaaaaagcttcaggtttattaatacacaagaaactatttttttttttcctgggtattgtctattcagcctatgccaagtccttcacacttagaaggaaataaaacacagttacagtgcaccttagccctactttcctacttaaatgttacaatgttcctctttctctgcaacagtaatgagatttgccagtgaattgaagggaaaaaaaaaaggaatctgggaattttgatttttctgctcttttgaggagaattagtggattaatctagatgctcccagtccttgctttttactgggcacgctgggcagtgatgtccaaatctggcttatcaccagcatctcctgggatctacccctggagcttttgtttcagaggccaggatgaggcccgtgactgctctacagatgaacttggaacccatttacttaatctgaccactccaaacaccatagttcttagtaatctgcaaattcctgggaatggagagaaaaacaacccatttgtgatctcttctaccctccagattatctctaactgtgtggtccagctgccacaggataactagacatgcaaggggaatagcctctaactctaccacagttccattgcccattaatttatatggcattttttctgacattgctgaatattttttggggctcaaataggccattgtcattatttatcaccatgtatgttgtgactgtaagtctacttttgattcaattagagaaacatttgcttaccgagagaacacctcctgtgtattggactcttggcttcttttttggccattaaaatggtagcggaatattttaaaatttggtttacagcctttaaatatgacatttccaaaaaatgtaaatcaaggaactgtcagaatatctttaaatgtaaaacatctgaagctgtgtgcattaggtttaataacatatatatgaaaatgtccctgatgtgtatatgaacactgaaagtaaaatatattaaaatactcgttttttgttttttgttttttttttttttttttttgagacggagtcttgctctgtcgcccaggctggagtgcagtggcgcaatctctggtcactgcaacctctgcctcccgggttcacgccattctcctgcctcagcctcccaagtagctgggactacaggcgcccaccaccacacctggctaattttttgtatttttagtagagatgaggtttcagcgtgttctcgatctctgtcccttgtgatccacccgcctcggcctccctaagtgctgggattacaggcgtgagccaccgcgcccggcctaaaatattctaaagggaacaaaaacaaaaacccaaaatcttcaaaccaaaagcagttgccacttctaccagttatagccgtagttgcttctgtgtattgtagtttcttagtgaattactgtgaaatcaggttagttggaacatgaataaaaatgtacaacataaatgaatatacgtttgccttcatattattaatatatggtgacgttttctttgataatctacatgccatcataatattgcccctaagattaggtattatgtaaccgtaaactgtaggaaacacaatatgcctggaggacaattctagaatatataactgggagcatgcaattgatagagagtttccagggatattgaacctagacatggagtacctggaaagccaggtcctcaggaaaacctattgcaacatttgaaaagaatacacataattaatgaggatgtgaaagatgtgaggcaactgtattcttagaccttcagtggatacctcatcgtagaggatgcagaaacactggctaaacataagttatgaatagcatctgctagaatgtagcaaagtatgtttaaaagagtatactctttcgcttgtgtctttgattattgaagatattttagggggacaaatgctagggggaaatctctttatgcaaatgtatttccgaatagaaaggaggaaaaaagaagcttctttgcattacctgccaccatgagttttttaatttaaaactcttttagaaaatgattaaacttagaacaacaataagaaaatatgtactggatgaaatggtttttaaccagtgacagaagtttagaaccaaccccaaataatttctcatcacacttttctttctcatttgtcttattcctccatgtaatagttttaaatggcacttttatgaaataaataactaaacaccaaccacattttttttcatatcctgaccaatattttggctgttttacagaagaactggaattctgaaaattaaataaagatttctgaaatgctaacttcagaaagttttatttaatttgtggaataattttgttctctccctctccatttttttttcaataaggtctttattaatttagtctagttacttagtgcttatattaaataatctaataaaagtcagggttgtaacataacatttcccaaatgtgaagcagcatctattacattagacaaaatctttatgccgcaaaattgtaaaagccatgtatagaattacaaggcaccaaatggtactgtatatatttctaaaatagaatgtttctgtagtgtaagggggtagtcagcttaaaaaaaaagtgtgacagacagctgtatcactatagtttattcagaaagtactctaaaattaattttaatttttaaataataatcttcttgataatttcctctgaaagatagaaatatgatttaaatatacaggttagtatttttaaaggtaaaacctactttgtttgtgtttgtcagtgttaccgaattcttgcaaacagagaagttatctgtggggatgggaaacagtgcattgtgtgtgtgtgtgctcacacacttgcatctcttgatttttagataaattcatatgacagtatatgttcagtgtttattttgaatcattgaattatttatttttgtttggcatttccttttgtattgtcataaatgcaggattaaatccattgtaggctcccagacaagtatgttgtgaggtttcattaatttgtgtaagttataaaggcacttgaataatgtaagatgactcaaaaatgctgtttcattttccacttacttttaccccaatgcaagccagttgaaatatatatagagagagtccttaaaatcaaagcagaaggtgtagaagagttaggtttattccaacaagttgtactggggcactgctaaactatgcattaaaaaggaaaatatgtatacttcaaaaaccatttttgtttcacctttttttctttttcctcattgaaaagtcattcccaccacagctttagcaataataactacaatttatgtctttttgctgctacaatttgatgatataccacagtcaggccacaggttagaaacacaggctgaattattatatactgctgggtagtgatttcctgtgaactgatttatggataaataattctatgttcttattatataggatagacagtttttaatttctttaacaaagcatagctgaacaacagaaaattatatgctatagcatatgaacacaaccactctgaggaagataaacagatgcaatcaatgtcatgagttctcctatttttacaaggagcctcatcagcagttggtattgtggaaataataccgagaaccagaagccccaaggcttagttcttctaaggctggggtttttattgacactcttttgtggagatcttttccagggagttatgagatatacaaaccccagcctttggatattaaagctaatgtctcatttttttttctcaggttgagttttcattttgctttaaaaattaatgttaaaatgcacctggaataaaagaaaattatccatccagctgaattataagaatactgctggatatcttgctgggttgcttatatctgtttcacagattgaactgtaggctttattgtgcagtatacccaatatatatctattttatcagcatctatctacatgccactgcaaactgtgagaactgttctcatgtacttcacaggcagcctgttgtaggccttcatgaagtaaatatttctcatatttaaggtacaggggtaaaagctatcatcttggcttattttaggaatggtttcacttagctatgtgtttagcaataataagcttctctgctcaattgtgagctccataattacagggacagtatatattgaggttatctttgcatcttagtgacttatgttggagggacacaagaaaaaagttgttgaatgaatgcttcatgcttaatacaaacacttctaatggctcattgattataatgtattatcacattttattttatcctcagacatgattgactttctaaaggcttgaatcaaatattgatcgactataatgtgtattatcaccactcttttgtttttatataattagaggcaaatgatactaaaaatatgaattatgcatttactgagaatagtaactgttttctttgagataaataccaaaaacatgaacacaaacaactattgatatttcttttggtgaaatgtcagctctttaactctggcagaatactgcattgagaaaataaaaaactggtttccattattgcatctttttaattttagacaaaaattgcctccattcccaatctaattttatatcactaatgggaaatttacctacaattgcattttgttatttggtctgtacacattacacattgagtagattggtactctatattttagtgaacagatttgtctggatatagacggttttattcatactgtgctcaattcaatcatgttaacatttgtatgaatttcaaccccaaaataaaggcccataatttgtgactcaaagaccttataacagcatctgtaatagtcttcaacaccaagcattttataaatgtttgcagatgacaaattccttgtaaataataaagatgattggaaaacaatgtttatgtctgaaatggcactgttgtgggaaactgttttttccagagaagtcccaagtttaactggctcttcagacttctgggactgtgatgtcacctgtttgctcattggtctcatttattccttggtttaacattaaatgtccagacactgcctgatgtgtgactgtggacgtgctctggccctcctctccaggggcccatttgtgtggttgggcgcttggacgtgggtacatcctcagggcatcggtagcagagctgagcagaaaggatattggcccagtagttcaaaaacttgcaaaatgaagcctaggttttattcctggttttcatccacttatgtccttgaaaagtcattctttgatcttcagcttacttccaggtagaatgctgagtccaggctgttttcataaggataaactaatggttgtataaaacactgtgcaaactgtaaagtaacataaagggatattgtgaataagtaggttttttataaggtatacaaaccaaccaagaatatttattgtaccgtgttatagagaaaggattacttcaggtgggttatctgggttggaattattcccatggcagaatttcagcaataatatagacagtttctagaagtgaatattggggatcagtactctagacagagtgagagtgtgataaattttcagagaaaaaatggaaattgccatgcatttagcatctactatgttcctggctgaactcaaaggtgtgtgtgtgtgtgtgtgtgtgtgtgtgtgtgtgtgtgtgtgtgtgtgtgcgcgcgcgcgcgcgcgcgcgcttgcgcacgtgtatgaaatatttcctaatttaatcatcactagtttttctcatttttcaaattggggttacaaaacttatagaatgtgaatgttgggaataacatctgtatacttaagttatgccatcattattgacatttctctagtgctgcaatattatcctcaatggccacataacttgttcttgcttctttgtccttgttcactacactggagtgattggtgtggtctgcatccctccttagaagccaggaagaggctgttgtaattgtaactagacatacctacctgaattatttcggttcttttttctccccttggaatgagcgctgtttttaatccacctgcagtccagtaccggttgagcatctcaaatctgaaaatctgaaatctgaaatgttccaaaatctgagatcttttgagtgtcaacatggtgctcaaaggaaatgctcattcgagcatttcagattttgaatttttggatttgggatgcctacctggtaggtataatgcaactatctcaaaatctgaaaaaatcagaaatatgaattgcttctggttctccaaggattttggataaggaatactcaacttgtataaattaatctctggaagttttgctttattgttgttatgtgtacactaagaaacttacaaggatctattgtcccttaagttttatggagcacttatgtagcagtcccagtgctagagtctccttttcatgtaaagtctcatgataaccctaaagggtaggcattgttcgtatccccattttacagatatggaaatggacacatggaaagactaaacaatttgcccaaagtctcacaggtgacaagcagaggaggctgggtgtaaactcatctttgactccagaccttactcctaacctttgacctatacagtgtgctactgagtcaggcattcacggcctcccaaaacttggaaccagtcttttcttctagtttgcctctcacttgagccagtgtgataacaagaagagtgagagcctggtctttgaagtgaatctgagctctgctacttgctagtaatattacctaggctacttaagataacccatcccttctgaatctccatttcctcatggagggagttgacactagatattcaggggtaaagaactgatggagaaattggaggtacacctatactagatttggtggtgcagaaaataagagactgagggaacagagagattgtcatagtgtttttgtttgttttaaagtaggggagggctaggtgcagtggctcatgcctgtaatctcagcactttggaaggctgaggtgggcagatagatcgcttgagcccaggagttggagaccagcctggccaacatggtgaaaccctgtctctataaaaatacaaaacttagccaggtgtggtggcatatacctgtagtcccaactacttgggaggctgatgtgggaggctagcttgagcctgggaggcagaggttgcagtgagctgagatctcaccagtacacttcagcttgggtgacagagccagaccctgtgtcagaaacaaacaaacaaacaaacaaaaaagtaggggagatctgaatctacttacaggtcaaaggaaagacgccactgaggagcaaggatggaagaaatgaatggggaagtggtgggaatagaagatgggacacattgatgtatactcctcctttgtgatttaaaacaaaagtcttttatagacacatgactgaaagctaatataatcatcaaaaatcttttgagtcaatgtattttgaaataaactgactatatcttctctttaagacacattaaaaaggtcaaaagaatgactaaatttttgagattaaattatattcatgctctttaataatttttacatttaatctgcacagtattcttgtaagatcagtacttttattgttccagtttacagatgagaggattgaggtatggagaattttaagtaacttggtagggttacataattagtaggtgacagagccaggatgtgaacagaggcaatttaacttggaagcctgcattcttagtcactatggtatactgcttcccaatttgatttcctcaattaacacttgactactattccaagtaatatttttgtctattttatatcagggaaggaggactgttctaaagaatgtatttgcaaagaggattaacacagtacgttagacagagaccctgtttggaggaaaggctcattaagagttactccaagcctctacctggctggagtagagtgggcttctggccatagctctcctagcagatcttgtacctgcagaccctggtaaatagctgtgcagagaccatgacttctaggactgtgcaagttagttaataaggtgcaaaaaaggaaaagcacacacttcccattgcctgggaaaatagcatgtgccaacagctctcttccaagatatagaaaccaaactgtagcagctgctctatgtggaggtattaagtgttgttaaaacacctgtgtgtgtctaattccagcccaaacaagtcttcttccggctcatcaaggtggggtaagaatttacctatatggagattctatttccagtagaatgagttgtctattatttcctgtagagatttctctccctcccctctctaaaaaattgaggtataatttacatacaaaaatgtatgcatattaagtgatcagtttgataaattttgacaatttgtataaccatgcaaccaccatgccaaacaagaaaatccccatatgtccctgcctatgtaatgcccctttctgtccctctgacttctatccccattagattagtcttgcctgttcttgtatttcatataaatgaaatcatacagatatattctgttgtgtctggctgtagtgtggtgtattcttacaatggaatgcttctttacaataaaaaggaatcaactactgacaccacaacagcttgaatgaatctcttgtagagttgtgcgttgaagcttgtagggtccttttttttatattacttgcttagtcttagtaaccaaaatgacccacaaaatctgcttcttttacttgcctatcatagtgcacaactgtcaacttcattcccccccattctgtcatatattatctgtgtgactttagaacacagccaatttatattcaacttatgggtgatcatggtaatgacttttgaaaggaatttaaaattgtagaatgattttttaaaaaggaaatatgttagacatgttacatggtttctttttagtatttgcaaatgtcaggagtaaaagaagcaaggaagcagacccactctctcgtgggtggctgtccagtgggccctggatgttcatttcatgactactacatgctgtgtgctgtgcacttttcattgtcatgagagagaatgttaagaaaactatccccgcaagaaaacagcttttcttggcaagtgaaatatgacttaaggagccagaactggagacatacggtactatgaatgagagctgtgttactttattggatctgagtccaggcactatttatactgcagcatattcagcaccagattgttaaatcttaatactgaaacagtgtatcattttaatatttttgttctgtttattccctgttttcaagcattatgtcaagcattgcgcattcatttatttcatcttggacaggacgtgccctgaccagaaagtccatttcctattgctggaattttgccccatagctgtcattttgtgaggctcttaaaagttcacttgggtgcacaggtgttttctctctttgatgataatatatttttttaaagaacagtgtagttggactcacctgtattgtcaaaaataaaaatgctgtttttcttttatcactaaagcatcactgctttttatgtgtggcaatttctgacatcctggagacatgggatttttcatcgcctacaaataaaatttttgttaccctgtgtcatatgtgaaatgggtttctctatttttcttcatcaatgttacgtgtgccctgtgtaccagataaaatgggcctatcttatgaataagttagcattttcaccatatgttgctgaaaccatcccatgaatcttcctctaacaagggtattcctaaaattgctgttctacgtagcccaagcttaaaaaggatttttattattttttcattgttatgcatgtttaccatatgcagcaggaaatccacagggaaaaagtactattgtcactgtcaaaagagctgaggaataaaaaaaagaaaggaacttgagggcatctttgctatttctgatctgtggtcaatcaccgtggtattgcatttggcctgggaaagcaaccccactgcctgctgaaacgcagatatgggagcgaactctaactgcttcatgagctccaaatgctgttcgcactgggaatcgcaccacagtcaggatgtaactgcgtgctgagcccacacacaggaattttcttgtacaattcaaaactgaatcttatatttacttaaggcttacttttttttttgtctatgaaatcagcagtcctgtatatttagcatcagccttaagttagaatgtgaaacaattctggggggaaggaagtatccgtatggttttctaagtaatttaagaaacaggaaaacataaaagaactgattgtctgtgattaaacctcattctttccttcccatcttcctgtatagttaactaactcaattgtcggccagaaagaaatagcttattgcactgggttgtaaaatatctgagtgggccttggatgttgatgattgaatgaccttcttaacattgaacaaacaatgggaaggtttaataaatagcagatatgtgtttattatgtttttcttccctgtgcaggaataatcaagctgggaaggtggaaccctctccccctcagttatgtgacagatgcacccgacgcgacagtggccgacatgctacaagatgtctatcatgttgtgacgttgaaaatccaattacaaaggtgggtgtttctgaacatctgcttttccttactgtcagagctgctccgtcaatcatagattcactgcaaagatcagcatgtcctgtctattaatttctggacattggacaaaatgaaaagaaggagagagagggaaagaaggagagaaggagaagggtggcccttccccaggtgtctttatagtcacattccaactactttatgctttgttttcagaagcagtgaagtggtaacctaggggcggcttgacaaatcattaaaaatctatagcccttaggagtagctttacacagccccttattcaatgggtcctctaggcctgcttaaatgtgtagcacatagtatttgaagaataaacacctctgctgttttcacatttgtgttatgaggggagagttttgttcttgtaggaggtttaccaagaatgtcctgacataggagatctttttcttccctttccaagggccacatcaaaacaaacaaacaaacaaacaaacaaaaacacactttgtggcctgcagagattctggggatgatttctttattttttcaaatatggcatctggaacaagatatctctctaaagaactggaggttctttgcagtcttttattgtaaagtgcctgataggtgtgatttaaggagtgttgtcctttagtgtaagtgttttgaattttccccttttgggcaatttatactttaaatatggacccccagcattcccatctgtgtctatgaatgggtgaggatctgaaaagtcattttttggttcagagagtaactctgagccattctatgagggtgagggtgggccttccaactgcaaatctgacaggggatgtttgtttacagttaaccttaggcatgcacaataattacatttgtattggggaagtttataaccacactgccatgccatttccaccagcacattggaaaaatcatattttataaaaatagcatctcttgtattgcaaatgactatttttcttggatgagtgggatgacaaactcaaaagagaccccttgggccctcgcaaagtcttggagaagcagttttacttcccttccttcacttagaccccattctttagcatttcttctgaagctcccacaagacccaagaatggctgctgcagtgtctcctcttcagtcagggaccctggttgaggtttgtgtattgttcattattgctctgttttgcagttgttcaaagttggaagacttgcctgcggagcagtggaaccatgccacagtccgcaatgccttaaaggaactgctcaaagagatgaaccagagcacattagccaaagaatgccctctctcccaggtcagtatcttcaggtgggggtctgggaaacagaagaagccattggtagactctctatcagggggttccttctgcttaaacaactgtcttctctgtcttttatttatagacttaaactgcatttgaggtgtaaaagattatgttgcttctggttgtagaatagaagttatagcttattaaccgggcatggggtagctcatgcctgcagtcccagcactttgggaggctgaggcaggctgattgcttgagctcaggagtttgaaaccagcctgggtaacatggcgaaaccccatctctacaaagaatacaaaagttagctgggcgtggtgacatgtgcctgtagtcccagctactcaggaggctgagctgggaggattgcttcagactgggaggtggagattgcagtcagccaagatcacaccactgtactctagcctgggtgacagagtgagaccctgggtggttcttaaaaaaaaaaaaattagcatttattgagactgggtaaggagagagtattaaaacaatttacgtatacgggccaggcatggtggctcacacctgtaatcctagcactttgggaggccgaggccagaggattccttgagccttggagttcgagaccagcctgggcaacatagcaagatagcgagaccctgtctctaaaaaaaaaaaaaaaaaaaagaaaagaaaagaaaatagacgttttacatatacagtcattaacttctcacatatttcatcggagatagggaccagtgtctccattttatagatcaagaaacaggagcttagagaagcacttacattcactgcctaagcatactagctggctaagtggcaggctgagatgctactccccacccccctgtttcaaagtggatgcaccagattgttgttttatttggtcagctggatgagtcagccatgctaaatccatctatgcatgatttattgggccttttgcctgtctggtgtagagagatgatctttacatcatatacatttgtagaggttttgtagtgaattcacaagaagaaaatgcatcatgaggaaaagtgatactctgttttttagtgaacgcaccataaactaatacaaaccatgaaaatgagattgagaggatcaaaagaagagcagtggaggaaagggctgccttttccatttgtgttcatgggctgggactcatttttttctactgatgagataatatttttcctatggtggattggggctgctgtagaaatgaacccaggttgacaaatcatctaaagctttgaatggaaatctgtttcctggtgtgagctgctacacatgatttaagacaatgtctgttaagttgaagggaaaataatgagaaacctattacagaaatttgctgtgccatgagctttgttccagggtaagggagtctctggaagataggaaggctattgggtaagagcatgtatcctggaatcagggctggattcatgtcctggttgacaagcctctataaccttacctttatgagccccccttgtttggttagtaaaactgagtagtaatggttctgagttatataaagaggattaaatgattggaaattacataaaatgcttggcctaatgcctggcatgcaatgatgcaccataaacagtatcagctattattattgagatatgatgtgaactgaatgtgtgtgtgtgtgcctttgagggtgttttggaatttggatcctctgaagcaaagtatgctattaatatttttgcctcgaaaaaaatcaagaaggcatgcattcacgtataggcagctagatagaaaaggacattattctgaccttatgtttaggacttttcatggaggccattttaatacctacctgtaggtatgtatgtagatgttaaagccttgttacatacaaagttataaaatgcatattttgattatactggtgatacaaaggaactggacaaagaacaagttaggaaaagctgtcaataatttttcccaaatttcacaatcattcacaattaattttctcttgcattcacatggaagtcgaaatgggctttgtgtggaagtgtacaaacctctaacttgatattaccaattcagaaatttatccagggcttctgaggcatgtggaagtttggtccaaactgttgtatcatgaaaatcatgtttggttataattgtagatatgactagagaggcaacatgagtgaggagaatccagatcaggagccaagagccctgggttctaatctcagttcttttatgccagatatgtgatcctgggcaagtctgttcacttctcagggcctcgttaaactcttctataagctgggcatcattgtatttgcatgtttcacatagttcggagggttgtcttgacgttcaaatgagatcatctttaaccctatcataaaaacctctttccccttccactctctgctctcatggtttgctcacgtagttgtctgacctaaacagtttcttctccctcacccttctgtttgatcctatgggttccatcacttctccatctaaaatctttttcccttgtgccactgccttgttcattctttcatcatctgtcatctaaaatatttcaggtcttcttgcctcatgacttttctcctgccacctgattctcctgtgttccttgtttataattcctcagtcactccccctacccaccctgtaggaagtacggactccatatcataaagaccatcaagatgacactgttcagccttatatttcactagagctaccttcttccctcttcctgcactcattctatattccaaacacatgaaattaattattttgaaatgtttaccattgctcaaaatatctcttgagagtgggagcaacctaactagtgtggcattaaaaatctaacaaggccaccttctgtattatcttaaaatttaatgccaagtttatattctagtccatatacctgttttgttgttttttgtttgtttgtttgtttgtttttaagacagaatttcgctctgtcacccaggctgaagtgtagtggcacgatctcagctcagtgcaactgccgcctccctgttcaagcgattctcccgcgtcagccttctgagtagctgggaccacaggcatgtgccaccacgcctgggtattttttttttgtatttttagtagagacgtgatttcaccatgttagccaggatggtctcgatcttctgacctcatgatccatctgcctcagcctcccaaagtgctgggattataggcgtgagccactgctcctggcccctgtgttttaaatatttttaaaatggcataaaatcattttgcctgttaagttagtaatctccttctctccacatgagattggttctttagggagatgtaccttgttaatctctggctttgaaagcccctgcacacaatcctggtgactctagagtccttcagtttgacacttgcttgcttttgcatgcatgatttcacctggctagaatgcactattcttttctacttgatgaaattatctttcagattccagctggaaagacactgctagtgaagtgcctcaacctcctggttgaagtagttgctacttctgctcttagtagcctttgtaaataaccctgtcacagcacttatctcagcctgttgtcattgttacctgtcagtttccatcactagatggactgtccacaataacagaggccatctcttattgatctttgtgtccacagcattcagcataatatatattttgtatgtagctgttactataatgcaggaatttaaccttttagcaggataattctttgtggtggggggctgtcctgtgccttgcagcatccccgtccattacccactagatgccactagcatgccactataccccttcccccagttgtgacaaccaaaatgtctccagatgttgccaaaggtcccatgacaggaggagtaccactctcagttaaccaattctctgatgtgcttaatgaattaagtttaaaaatgtttcataaagtatagttttattagtatgtaaagttttattattattacagtgttcttggcagttccaaaacattttgaactagaaacagtgaatagagtaatttggtgattgatgcccagcacatttcggttaaacaggggctcatatctgttgtttagatttgggtgagatttgatttaggcttctgatatgttgtgtgattatggaaaatctcactgggatagctcttttcagctatcatggatatgtaatgtggaccctggcattcatcctacagccattatccttaaacattccagattattcacttaaattgcatagctagattgtaatttagtgtggagataagcgcgcctattttgttggtagttgtcatagaacagatgcatgcagtttttatagttcagcctgtataaagtaaaaaagaatgcatttttgttctaagcaaggtgaaacagtaattcaacagtatatttccaccagcattcctggagtcctgattaagaatcaggcactttgcgatgggctggggatataacagtgaatctgagggaggaactaaaaccctttcaatataggaagaagagagtgaggcatccagtactactcaccttaggtgagaaaggtggcttgttgggtttttcaaaaatagactcaactcatgagtaaaagattcctgttattgaaataattcttccttattacccctaagccaaaccattttaggtgattcttcacttgagtttggcaattacaaagggaatgattcagtggatagttcatactttcttgaacaccccagtggtctgaagttcaaaagagcagttttgaaggtggaagaaaggtatggagaagtccataaaagtgccacaattgtagcctgaggcatatatatatttaaaacagggaagtaatgatttagccgttctctgtctggccagatgcttggaaagtacagattgtggttgtgtgtctgcgtatttatttttgatttcacctttcaaagtgtgtttaagtgctggcacctcttccttttcctctgatgtctctgtgagtaaccacttgcagcctctttcctctgccactggctgtcctgagcatcctaatttagcagaccttaggcatcgtcctcccttattaaatagtccttagctgttccaatttgaaaaccttatgattgcatctttctgtggcttacttattcttacttgaggaagagttgaaatacctaaggtcggcttttgattgcaaaaccccaggtgctcagggttttgacccatttaaataagtagaggtaccagtacctgccttgtgcatctcataggtgatcatgatgttcaaatgggatgactaaagagacagtcttgttaactgaaaactgtggggttttttttttttttctttttgcgacggagtctccctgggttgcccaggctggagtacagtggcatgatctcagctcactgcagcctctgcctcccgggcagaagcaattctccccgctcagcctcccaagtagctggcattacaggtgagcaccaccatgcccggctaatttttgtgtttttagtagagatgaggtttcaccatgttagccagactagtcttgaactcctgaccccaagtgaccctcctgcctcggcctcccaaaatgctgggattataggcataagccattgcacctagcctgaaaattgtaatgaaaagaacaatttgcaagtgcatgcaacttccaatgtgctccatctcctaaacatattctctgtgactctagacatgttttcttatggtaaaatatacataacatgaagtttgccattctaaacgtttttaagcttacaactgagtagcattaattacattcacagtgttgtgcaaccatcacccctgtctctttccagaactttttcaactctccaaatggaaagtctgtaacctttaagcaacaattccttattcccctctcatcctgacccctggtagcctctattctgtattctgcctctgtgaatttgcctattctacctaccttatgtaagtggaatcatagaacatttattttgtgctggtttactttacttagcgtgtagacatgtttttgaagcagctctgtcccatggtgctggctgagactttgttgctgaatatttgaggaacaaaatgactgactaaagctattgagctgcagagatgttactagatttccggtgtgacaatggtatggcgttcatgtagtgtgcctttagaaatagattgtaggataattatttctgtcatcctgagcaagccttacccatttggacttaactcatatgtacaacatgccaaaacaattgagtagtgaaatcaagcagccaattgggtcagcagaaaaaaacaaattgagcatgtgctcatcatatatagtggctgatcaactgcatggaccagaatcatggtaactggttgccaactgtccgtttaatttaacctaagttcatgtatgtagtggggatgcatcatgtcttgtgttaaccagttgccaactgtctgttttagttattttcatgtgaggttattttagtttgtgtcccaacctcgtggactcatgctgaagaaggctcacaaatgacagcttgaaaatattcctaaccaagggattgcagtgaccataagaaatgattgcacagtggggagaaagatgccatttgctgattccacatcttgtgctaggccttttacacaaatcatctcacagaagaatccttacactctctgatgcaggagacaatatccccaatcacaggtgagggtgctgacattagagaagcaagccattcagcaacagcttaggggaagagctctcaaatgtagtgttttcatactccaaagttcagaggaagtgtttctttcccttaaaatggcagcagttttcaattctgatgttatagctcagaagtggggacagagagggatagtagaaggctgccaaatgacattaaatgaatttttttcatgacaaagtaattcctcagaatcagtttttttcccattacctaattgaagtatcattatattctcatgtttaatatgttatttagcatatcaccaagcagattgaaaaggccgaaaatgagcaaagaatgcacatatcactcactcattgcctgtctttgctctctccctcatgaagacatagaagaggaggctaggggatgcccctcctcttccctcagacaggggattctcactgacagaatatgtaattcttcacattgctttaaaaatgttcttcttcataacaagtgtattatgtgttttcagcttagctactcttagtaccacactgctgttcaaacaaataaatcccaccaagccaagcagattgtagtgaaggatatccagttattttatcttttgttttattttgggaaaaggggatgctcagatctctgtttttctaagtgtatcttacaaatcattttaacctgtgtttattattttgctttttcctattaagttttaaattccctttaggttccgtagttttcttggattctaaacttcttagttaacttgtataaggggcctgagatcacagcttcatgttttcctttttttgctgttgttaccttgttttttgttttgtctaaagtattggttgcagcatcagctgttgagcttggggtcgctgatggaggtggtggtgaatgtttccttccattcattcgttagtctcccttcttaagagatccatgaaatactggtccactaacagagtgtcttcatggtgcctcccagtgctatttgactttgggaaagatgctttttattctgagtttctggggcctcagtttgaaaatggaaccatgcttataatcatatgtgacatctattctctgggctagttgaaaaacaaacaagtgagttaaaaagttgtttcaggaacctaaaagaaaatctatttttagatagatcaatctagctatcataagtattaaataccaatattataaaatttattctcttgcagtttggcttagagcaaattcaagtctgctagtaaactttggaataagtaaagaaaattctaatacagtttgatttctgaaataccttatttaaaaaaaattccagatattaatggccaactaaatgtcaaattgactacaaataaggacacctatactttatctcccatccaaaaacctttatacttaaaatttcataattaactacaatgaagtcagaaattttcaagtttctgtagttggaaagacattttaaccattttaatttatcttagaatataatattattcataaattagctttgtctgtggccactgtttatgtggtggtgtttgtggctgtgtctcggtatctgagtggggactgccgcagttgcccattatacgtgtaccctcatcctttctttttcacagcccaccaccatgcaaagcgatacatgcttagtaaatgcaaaatcattttaatattagccttagtaaatcatagttcctcggtttaagtgttaaaaatagcaatacacatattttctgggttatttgtattagtattgctttgtataaacagagatactcgagttggttgcattctggattgaaaaagttgactcagctcttattcctttatcaaaaagatatggatcctaacagtccaactgtgcggttgctttagaatgactggaaaacataaaagagcaacataaactgcaaaattatatgtattttaaaaagcaaaaaattgaattagatcttttttggcagggtggtaggtgggaaagacattaattattactcatcccattctgcatcaactgtatcttatcaggtttaagatgctattgattgtaagatggatctctatttcagtgatgttgaagtataaaaagtggttgaaatacggtaaatatagattctcggtgtcccaggacctttagagaacattgttttctgtagagtaatagcacatgctgggttcatgttagcccctttcaactttatgtatcattaattaagtgttgatgttctagatatttaatggacactaacatcaagatgaccttgtggtatgtgtccagagcattctagtgaagcctagtgatttagcttcagattatgagaatttaacagtctaatgtagggttagaaaatattcatgaaactggaataatcagatataacatggcctttcttttaaaatattcccaagatatttttatgtcttctgattttaaagtcttctgaggatggactataacaattcttatcagtaaaaactattttgggtattagttctatataaagacctgcagggagttgatatgaataaaatgtgtcataaactcaaacagacttttctggtgattaaagattctcatctaggaaatttgtttgctactttttttttttttttttttttgctcagttcatagttgaaacctgtttatgtttttgttatgtgatcagtagaggtaacaacttatttatgattatctgggacagaaaacaaatctaattgagtcagggtagccaacatctcctttacaaatgagttatatgaaatataggacctgccgacggagccagtaggagcccagatattcatttccttgccactctgccttgtgcagggtcaattgaagatatagcaggagcaaggacaaagagagggtagagagtgaggggaatttggattatctggggccaaaatgatgcagtcgtctgggcttgtggcctcgtattatgggccaggaagaattgaggaacagtgccaggcagtaattagacactgttcgttttagttaactttctagaccatttggcaatacagagtttaactctgactcctgccatggctgtgtatcctgtgcctttccagaggataaattcatacaaataagatagagagatgacaagtacgtttgtggttattcacatataccagtatgactgatgcatctattattaagctactttcatgttaaaaaaatttattactatgacatttcagtttggcacttttaaatctcatctctgtcccttttcctgtgttaaatttcagtgactcagatatcccacatcagaactatgtgagacacgagatagaaaaaaaaaaaaatgaaacagacatagtcactgtcctcaagggtctcacagtctaggaacagagtgaatctcagccagagcgggagctagctcagctagttagggaacagccgtacttggtcgttaatagcgcaaagcagaagactgtctccaggagattaggattccagtggtcatcctataaggcaggagacaaggcctcataggttctgtgatacactccgatgatattagctctttgagttcccagtgctgtgttcagaccttgggatgaaaagagttatccttactatcttccctcagagaaaagaattgtcatgtttagatcagcaactggggagggctaaccatctgcgaaagaggtttctgtgaattgaattaagaaacccctcccctaccagtactgcatagtgattaaaaaagaggagtctgttgttttaaatgggagtttatgaaggtctgtctgctggcattttaacctcctgttaaataacttgatttattgttactctttttatctctattactttgtagaaatgtcgttagaagttctaagatttctctgaactgttctatgtctggggctaactttttttgagaaagatgagatttcaaggcaagatataaaaccttacacaggtcatttggatctcttgagttgtttatgcacaggacaaaataaaaaataagaaataaaatctatgtataaaacatacacagtcatttcaggtatacattaacatctgccacaaatgttggcccaaacatactgtattaactgcatctctgtaggaagttcaattcaaggtgtgtaattataattttaacttttcagtgctatgtcaggctatgctccacttctcttttaaccccaatgattaatacacacaaatcagctgagcagttgggctgaggaggatgagagcaaggaagaatcatgcacctaagcactcagaaagtttgagctttggttcattttttattgaaacacagtacaagtattgtgtttagtttcccctgctctaaaatagcactgttaattttttcatttggtgaattttcacacaagttctaatcacacgtttctataaattatattaatttaacttatttccctaaatgttgttctgcagtgtgtagcacggatgttctcagattcttggctgtgtaagcttgttgcagttggaagcggaacagaaacatctgaaaggcattatttggattacggatgctggagcatctgatctcaccttttgctctggttcctaaatcacaactgttcttcctctttgcatttaatctgcatgttctgtcccctccattgttgacattgccccagggttggctttttggagaaagcactatcattgtataaattaaagggatggtaaattcaggtaatcgtgtttgatgttaatagttcagtttacaggagagtgactgttttaagtttaaaagaaaaaagaggttagtgcaggttataaagtgctctttcttgtccctaaaaagaagtagtcatattttgaaaaaataactataattttttttttcagagtatgatttcatccattgtaaatagcacatattatgccaatgtgtcagcaaccaagtgccaggagtttgggagatggtataaaaagtacaagaagattaaaggtaaactgacttttttgtttgtaaagcctgttttcagtttctgaggttcatgagttgttggttgtttggaatttatgctcattttagatacaatttacgtaatttttttacaaaggtgagatctttaatattcctgtcatgagatcctagttggctcccttaaaactaagaagatatttgaagtaaaagtaaaattagtagcaccatatgttaagtttatagttttcataagtgatacctgcaaagaccaaaatcctttagaatggaaacttaaaagctgtcattctaggttaaatcagcacttatagtttgggtactgattaacagatactgttggggtatcaggatgtctttggtcagaaatggagtttgatgttgtgttcctgtgtcgacgattccagagcagtggtgaaaacacgggctctgcattcaggcagacttgggttcaaatctttagcttctacattctagctgtgggagcttaagcaaattatttaacttcaccaagactcaatttcctcatctgaaaatgggaaatcatcaaagtacttaggtcactgggtagatgcgaggactaaataagacaatactggcacaaagtaacctcttgacaaataatagtatactactactaataattaatagtagtagtcatactagcagtaatatattacatgtagaattatgtttgggcctgaaaataaagttcctttgtgtagtaaatagcatgctatttagatcacctagacttttaaacatgtcaggaccatttcaaatatgtcagtggtggaaaaattcttttgttttcactccattcagataaatgttacctaccagggtccctgaggggatttggggaatttcttgtaacattggttttgatggtccttccagtccatgttttgcataagtatgacatatttatcacactttataatatgtattcatagccttgcttactctgcccccatcggaggggcaaatgacaatttatggtgggtaagtaaaagtaaaggatgaatttgtttcttttactacttgcagattttctcaggggagacaggatgtcaaagtagtgcttgttggctattgagtgtttgggagatttttgacaaggttgtcttttgaagaaatgaagtttacaaacattggcagcacatttctgatcacaaaggaatgagagtgttttatgctaaatatatgttttataaggcaagccaaaatattgagctacccaggagaaattaagtacactgaaaattgaattaagatccatttcttttcaacagactctaaaattcttaggacccgttagatcctggtttgggcaaatgctttcgcatattaatattcacccttgtgcaatataagatgaataaccccttctcattataagacatcgatgtgtggctcagaaggtttcttttctgtaagtgttgcctccaggtttttcttttaaaataggattgttaaagtactttgacatatcctcttcggctgaaaatcaaaagaatcatgcagcttcaaggtcatttgttagatcccatttacttgctgttataagagaaagtaagagagtgtcctcttttaataggctggagtgtaattccagattcagaaagattggaaactcttcactctagtgttttcagaattgccactacagaatgtgtgtgtgtgtttgtgtgtgtgtgtgtgtgtgcattcgcacattaacactcatatcttctacttttcttttttctttcctggagctttaattcttcaagctgtatcttttttttttttttttaaagatagtaaatgcacaattaaatctttaagtgctgtaaaagcagactgagaccttgatttcattcagttggtcaaggatccacacctgaagaggctgtcagacactgtgtacacatactattcaaagagatggagctagtcattgctgttgaaaagtgtgtgtgtgtctgtgtgtgtgtcagtaggaggagaaaagggaaggttaaggtatgtgtgaagtaaacacaagctgccataaaacagttcaagtggtgttgattcatcaaccaagggagtgggaggaaaaacaaagaattcatgacaggtataatggtgtacagaaaataaacacccagagaagtgcgttttattaactttcgaccctcagaaaaagggaagtgttggactgaagcaggcatattttatttggtagaagcctttttctatgaatagatgttgctgtgggagtttctacctagtaggactcatttctcatgggaaagtaatgatttgatttgtaagagttgtgtccctgctttcaaaatgaaaaaaaggcaatgaattccaaatttggaaaccagtagtagtgaaaccagaattctaccatagggctttttctgagaccccagaagtcagagttccatgtccctctcagcctccctaccttccatttctgcctcaaagttaccaatttacatgcacttctatgcactattcagcttagaagaaaatcttaagtcaacttactgaggtcccaaactaaatgcaggctacattgttaaatatgtttcctattatctgctaatgtctgttttaataaaacagtgggaactaagtggttgcttcttaatcaaaaacatgatttcctaaacataagctatgtgattctgttacaaattgccacatatagatctcctaggtcaaaatttttttctcttctcatagaaataaataaacggtaaaataatgatatactctgaaagatcaaagtaaatatgactaaaacctggcaaaaataaaagtctactggaaggacaaaaaaaagatcagattgcaaattctatagtcaatgctgaaataaatatgagaaaaatgaacaatcaataatttgatatcattaaaaacagatgtaaaaactacatacaaatggaattgtctaaattttgaagtaaacattttaatgtgcattttttgaatttgttgttatttcagctaaactatttacacttattctttagaaagtcctaaattggtttggcttagcatgttaactttattttccccagtgatcacagcaaagcacattctgtttaccttttttctttaatttcaaagacaatcatggttgacacagacatatttgagttaacatgagcattacttcagaatagatagggagacagtgtgtatactctggtttcaaggtctaagaccatgaatctgtttcccaggaatatttgacattgaagaaaatggagtgggtaggtagggtagggtggtaggttggtttagacagcattttttttttaattgctgatcatcacataccataattgcttctggaccagattttacaatgtagagctcataagctccgaagtataagaaaaaaaaaagtacattttatctaaaagcaaagaaaaaagaccaatattaatagttgtttaatgttaggagttttagtattgtacatgagattccatagacacctagaaacattcatgctattccaaaattatttttaaggtcttgggattatgagggatttacccaagtagttttttcctaagttctacacattttagtaaaattttaattttttacacaactttttttgtctgaactcttgatgtgaactttccccatcatttttatgaaatgaagtggcaatcatatatgtagtagcactatcagttttactctcatggcaatctacttttggggggatataataaaaataagaaaacgccttaataaagaatcttttatatattttaaatgtgtcctaattaataagttacaagaaaataattttatatctaaagtgtttgtcatctggtaccaaaagcaaaataagcagtcatctttggtgaggtcaatcccaattatttaatatgcctcaagaattgaagggtcattgaaagtttacacaaatacaggtggttattataaaattatttgtgttataaaataataccattagaatgagtggacctaaccaaaccctgtattttggccagagtgcaaaattatccccatcacttttcttttctcagtcattgcccaagaaccgtctgattgttagttgtcttaattttatttgtttatttgaacttcttttgccagatattaaaaagctgggagaaaagaggattttaaaaaccagtgttacttccccaagcctggtttattctactaatcagtattttatctgaccctgtctgatctagtcttgcaagatcaaacgtccaggccagcaggcagacagtaaacaaagcccatgaagggtttcggtaaacacaaagattagatgttgaatgaaaattaaactccttgaactagtcctctgtactaaagtggttaagtgggttgtgattaaaagaaataagtaattatgatcattatagctgaaatgatacaatgttaccacatttaaagcacctcttgtactcaaaaatgattgtgtcatttacaaagtggtgccttggagttgaatagagaaatcaatgtcccctgacctggttccataaggcagcccttgcttagccatggtggtatcagtggtcaggacaatgcctttaatcaactcctggtccttctgcctctgctgttgtttaactctgatgaggtaaaagtaacttacttttgtctacctaatttttctgtcatgagagaaatttgctttcagcttcagatctaaatgaagtgttctgtaaggaagtttgtctgccttctgcctatgttgtaagtttgtctgccctctgcctatgttgtatcttgttgaaagtaatggcaggataaaatcctttgaatattgtatacatatttacttacgtattttatactgacaaattatagctgtttacagggtacaaagtgatggtatggtttttaatacaacgtgaaatgattaaatcaagtgaattaacctattcatcacctcaaatatttgacattttttgtgatgagaacatctgagacttactctgtgatattaaaatgcacagtactcaattattagctatattcaccatgctgtacaatagatctcaaaaaaaaccacttgtttcgcctcactgagactttgtaccctttgattatcatctcactgctcccacctcccagcctctgttaaacaccattctactctctacttctatgaattcaattgttttaaattccacatataagtgagaacgtgcagcatttgtctttctgtgtttgacttgtttcacttagcacaacgttctccagttctactcatgtcgtcacaaatatcggattcatagaaatagaaacatcatttctactgtcagccaccttttatctcaccagtttttcaacatataggagagccttgtgtgttttcattgtgatagtcactgatagtatgcatagatcacctatgcttgcttggccctccaatggaaagcttattggtagtttaagtggaaaaatggtgcgtggggaatgtcttgagcactcagcttagacatggactaattccttgcatggatcttaagaagctcattccagctgtactgtaactgctttgttgggctgaatatacttattcataaatgtttaaagatataaaaatgtttgttaataatatagtttgtagattaaaagaaatgagcttgcaatctactcatatttgtactatttctgatgttattttaaatagacattaagaaaggatgcaaagggaaaaatgatctatttccttacgcccctccctgcttctcttgcatctattcatccatccagcctcatgtatacctactctttggaagaagcataagacatagttcctgctttccaaaagcctacaatctgtatgaaatgcttactttataatataacacatatcttgtcattcaaaaacaaattctagcttctattttatatataatacctggcaggattctaagggctgggaatacagtggagagcattacctttttcttcctcacaagataattgtagtcataattaagtaaataattttaactaaatgtttagtgagcacttctgctacaggccataattaatgctagaagcagtgagaaatgtccatacacacgtaagatatacttcctacctctggttgtgttgtccttaacctggcaggggaagcagctgtataaatggatctggtaaatatatagtagtgatataaactagtgtaatggtggcatagaggaaagtccggaaactcttcttgctagatttgacgtggggtggggggtgggcggttagggagagacagcgcatgaattataccttaaggacaagtggagttactgcagcaaggaggaaaagagaaggaggaatgttttgggcaaccgcatgatcatcagtacagatgcagaggtacgaaagagcattgcatgtttagaaaattacaagtggctatccagaatgtctagaatggcagtacatttatcctgatactataatataacaggtgctcagaatggctaagcttttgatcagtgaaaaggcaaaggtagaactagctggatatagggagggtagtgacaccaaatgttgatagaaatggttgggacctggctgggcgcggtggctcacgcctgtaatcctagcactttgggaggccgaggcgggtggatcacaaggtcaggaggttgagagcatcctggctaacatgatgaaaccccatctttactaaaaacacaaaaagttagctgtaatcccagctacttgggaggctgaggcaggagaatcgcttgaacccaggaagtggaggtcgaagtgagctgagattgcgccactgcactccagtcttgagtgacagagtgactctgtctcacataaaaaaaaaaaaaaagaaatggttgggacctggctgggcgatcatatttgttgtaacaatgaaaaataaggctgagaaggtagagaacacaccttaggggtctttgaaagcccagttgacgtattttgagaatccttgaaggtttttcagcaagagagtgacatattgaaaatgaggttttacgaatgattcccctagacaccatctgaagctgtatgagggtgtgagtgggtgtatggcaggaagggaggtgggtgggagggggaaggctggtgtgtacacctggtggaagtaggcaaagtcgaacctattgcagtaattgacggaaatggaatggtgagggaagtgaggccctggctttgagtggcacaagtgagaaagacaggaagccaccaatgcaagaggttcaagcagaggagagccatgagacttggtgagagtaagtaggggtatgagaatgagaaagagacatgcaagcagaatccaggttttgagcttaagtgactcttgatggttgtgacagaaataagacaataccaatggagacgaaattgctgatacctcagtgagaattttgacaactaggtagaaatgtccattaggctgtttgacatgtgaaaccagccgactaaaggacaggatggagaataaatttttgagcacttttttggatgacaattgaaatggtaccaaatgaacattccttaaagaggagagcaagagcgggagagggctggaagctttgagaggaaaagggccaggagttaagaagatgcagctagagagagtgaggtgtcactgaagccaagggaagatgagttaccagggggaagtgttatcaagggtgcagtggaggggcaggggagaggagagggaattggaggctcttggctttggcagaaaggataccataatgacattggagggagctgtctctctgaagtgtgagaacagggaagcctatgcatctactgagggaggggtggcaaggacatgagaggaaagagtctaaacgtggctaactgaagcatgagggctaagtgtaattatcagaaagaggatggagccagcagttttgaagaggaagaggagtgataagcaagagcccaccaactaggagggaatggatttgaggctcagataatgcagtgcctttgaaagaaagagtaatagtgatgttttcttcagaatctgggagaagggcaaggagatgtgtaaggagggaaggttctagagatggagtggacggtgaggatgggcagctcatgccatgaagtgtgaggctgggctggcatgacctcctagcagtgaaggagagaatgattggcatgggggcttggtggtgagaacacctgaaataggatctggacagaccatgtctggggaacaaggagggagtgtgctttagattgctcctagtttcagatttccatttgtcctgcccagaaacagaataaaaaaactcaaaaacatagatgtgatgggggctgacaaagaatctacagaagtgtgaaatgagaggctttgtgtgtagaccatgaaatgcccagcttatttaaaatctgatgattgtggggacatcctcttctactggggagaccagcaggtgaaaatcagagaactcttttggtttcttgatcaattaaataaagattattacctaattttccttagacgattacaaggttcaaagctgaaaagcacttaagctcataaggtgcttgaagcactttaactataaatgctatgtaagatactaggactgaaatcacattgcctaatgggagacagttatttaactatttgcctgactgatgaatggccttcattccaccatttgtgagaatttgagattatttgacccttggagttctgaactcccaagggaatagacatgaatctataatcatctagagtacaaatcagactatgagttctaacattgggcctttcagggtatcacctttctaagttttatgtaccatagaaattttgatttttgactaatcccccttctgggccaaaagctgcttgaaagaacttcagaggtagaggttttgggaacacaggaacatatccattttctgtcctccccagagtcctgtgagcatgaggccttaaacacagtgaatacttagtaaatattaatataattgaatgtaatatagatgaacttatttgaatatatgcatttagaacagttttatttttacacatattatatggtgcactgatcttatttgctacctgatctgtcaattgagagaaaaaaaagaaagaaaaatctttgcttgtttagttcatgttgcaaatgtccttagcaaatgtgattggttagaatcattctatgtttctactagttattgagctaaagacttaacagtagtcaattcagttgaataggacagtaatacctttataaagtacgaattagagaacatttgtgtagcctaagataaacatgcctttgaggttttcacagctagtttattgagtattttcctcaatataatggcctaaaacatcaaagtcctataaaatcacagagactggtcagaggaaaagaatgaatcatgaattgattgttttctttgattaacttttcttcaggtaggttgaattaaagaattaatacacatggaatgccaactgacaaaggcagaattttcctaagcagtaatgttaagtttcaacaatatgatctttttttactatcatgtgctgaattcaccttagaaattatagttttagattaaaataaagaataaaaatgaagatattattagatataagcagttttaacctatgtagaatgttataggaatacttgaaatgatcaatgatatcaaactgtgataaagcattgtttgaaaccaaaagggacaatagtgttctggtacagagggtggagactaagaaaggtagataatgctcactttttccatggaacataatgggtcctaggagcttttattagcaaagaaacagaggtgtccacatttgagttactttatggtggatatatgtttctgtggaggttaatatgatggaaaaaggaagttgataataaggggaaaatacacctaagaaaaccagtcatatggtattatcacaatgctggctggtaggctttgcttatgggctgttttattaggagttaacaagttggctctgaatatcttgctctaggcagggactttgcaagcaagttctcaacccagagacaaattctcttgaacaaatttagagaaaaacaaaatctttgggtttggtggcaagttttttgttttttcttttttctttcttttactcttcagctctttcaagctcaataatttttttaaattatatttggtgaactcatctggtagttttatttgttcgttttaatggtatgggatttatatctgagagatctattagctttggctactgcaatcatgtccatctgtgtttgtattaacagaatttttttttgtataataaattgaccttatacctccagttattgactaggagagaataaaccagaagtattttcagtgactaggcatattcagtgttggcagacgggatgctattctggtttgttgggggaaattagcattatgtttaccttttaaaaagattttaacccaatgaaagagtttgggtggacagtggggttgttgaccattaatgtgtagcccagctgagtgaaaggagacaaaataagtatcaggtggaagcatatggaattgccatttttgtaggtcaaaattgttacgtatcgccaatttcatatagttcaattatatgtgaatttgtgattgcccaagattctcaagctgttatattatgtgagtgtgcatacccagtttcatttcttgttggttacttgtttcaaagaaataatttctatttatagaatttatagggtacctgagaaagctctctgctgtgtgattcatatctttcatcagtcaggtgggagtccatgctgatgacactcattttgggacaaaagctttggcctcaagaaaaataagataatgggaggggatttataaaaataaatataatcactatatttatatactgattatataggcacatatatatatcttacagatgactggaatgaattgctaataaactgacaaaataggaatttaaaggagctatcttttatcatcaaatagaaatgcactttaaatcataggcagatgttatggacccatctacatgtggcagacagttaaagtgtctgaagcaaatatattgatggagttttttaaagttaagattattcagtactgtatctctaggggctgccattattcctggcacatgatagttgattaataaatgtttattatatgaattttaatgtaaataattctatttaagtgactagctgattcaactgttgaggaatcaatgatttcatcactttttgaattgacagtcttttcagtgtatgttacacaaagcatacagtgaaggctgaggttgagcttttaccattcagatgacttatccatccttcctgtcacatacgtgtgccacgtgcacttgtgcacacaaacatgcaaatacaaagtgaaacttatcggtaagaaagttgattgctcctgacccaaatcctaaagctattaataaccacatgccccaaactgggcagttcatcttaagcagcggaatacagactgcagggtcctaaaggcataggtttgaattcagaatcttccattaacaggtttgtaacatcaaacaattatgacattaaagtcaaataatgacattaaagaagccaactgagcttcagcttctttaataaagtaggcatcttaatatcaatgtcatagaattgttgtgagagttaaacgataatgatgtgtcagggatttagctcagtgcttcagctactatataaatggtggggcttggtgttacctgaaatgccaatacagtttgaaaaaggtatgttagtagtaaaaatatgaaaattcttataataaatatattttttctaaagaaaatccattaaaaagcacttgtgaaacatttaggctttagaacttgactttgagttattcacaaaaagaggaaaaagtagccatgtggtttgtgtttcttattacgaggcgagagccagcagccttaatcattttgaatattcctaaatatttatctgcatttggacagttattcgacctagagcacattttttaaatttctctggtattagacaagatcgttgtctttaaaaactgggcttcaaggttttagagcataaggtggggaagcagagaacctggagaggaggtttgtaaatttaaggcattcatatgctcgagtatcttttttctgtgctctaatgtttgggtaccaatttgaaattgttggtttgattggcaacatttttactaagagtgccaaaagcaagccagtgtccttttttacatttgtagaatcacttccagagtactttctaaggttgaaagaatcgtagagaaattctgccgtcgtcttttctttctttcttttttttttttttttttttttggcttatgttcttctacccagggtttctaggagaggttctggggaatactagagtgttatcttattaaggaatccattagcactcattcatgctaatccatttacatttgcataagcatcttaatggcttaaagaaaaatccataggccagagattctggaaatttctcagtgcaaaaccttttacccaattcattgctttctacccattataactatggacaaacccaaggggctgtttcacaaaagcaactgtgttaaggtttacagcgtgaaaatactacaataatagctttagaaatattatctatcttttttgcagtattgataaacttgcaagagcaatactgtaattaatattgctattgccactatataaacaactatttttcttgtaatggtgagtttaatagagatatctaaggaaagtcttaaattcctgctaaagagtaaagagcagaagcaagtattctgagaaagataattgttttaaaacggtacttttaaagatgctcttagataagtaacctggaaggttactttaagaccactttacaggtaattcttcccattttacagataatcctcagatcactcatctagttataacccaggcctttgaaatttcagtttgcttttctttctacctttcctatgccaccttgctattattggcaggcatctgtgccaatcaggtgcttcaccttttgctcaaaaaccttcagaaactatactttggggcactaagtcattggattatattttgagcattgagattttattatatttactttacataattgcaaaagaaataataaaaattaagtgccagaatataggagtgaaagactatatatatatatatatatatatatatagatacacacacacacacacacacatacatatgtatatacatacatccttgtatatatacacatatatacacacatccttgtatatatacacatatatacacacatccttgtatatatacacatatatacacactatatatatatacatatatagtgtgtatatgtgtgtgtgtgtgtattattttattttttgagttttgaaaatgttcttgtaacaacctaaaatatataaatatatatcagggatttatgttatttaaaataaatacctggcttcctggatgtaccgtaacaagtgtcttaaataagatttttggaccaaataccttttaattgtaatgcaggtaaattcctgagggaggaatataagtttctcatctatgaataaccagccacaggcagcaattgtgagcatctgaatagctaatggtcatagagtgctcttggttagagcattgtcgctgtgaacttggtgaggttttaggagttactgaaattctaatatagggctacaaaggccctacctactttagagttaaatggaatcccagaagtttagagggtggttggaaaatggctgcccattccctgcagttttcactcagtcccaggaaacttgaaggaatctgcaagatcctcttagaactctgggtttctcagagacctgaacagactccatatctgaactgtttatctggaaggtccctggactggtacctttccccagatgttggaatagctaccaaaagtctcacagctactggacgtagaagcatttgagcctcccttgccttgacggtttcttaaaccatgttctgtttggggacttacattagaaactggggacatcattcctttccaggcaattccctctccagtgctcaccctcaaggcttcagccacagtagaatcaagttcactgtgaattaaattgcagctctgatttaaagccctgggagcagttgtgagttatttatttatttatttatttttgagacagaatctcactctgtcacccaggctggagtgcagtggcacaatctcgactcactgcaacctctgcctcctggattcaagtgattctcctgcctcagcctcctaagtagttgggattacaggcatgagccaccacacctggctaattttgtattttagtagagaccaggtttcatcatgttggtcaggctggtctcgaactcctgatctcaagtgatccgccctccttggccttccaaagtgctgggattgcaggcatgagccaacatgccgggccagcagttgtgtttttactgtctctttaataagtaagcgtgttgcctttatcagaatattttctgttgtgaatgtgaacattgctttcaccgtcagagacagcactaccttttacccttcattttttccaggatttctgatcttctgctaaatactgcagggataagatggcccttagggccaaggtgatgtctttggtcttggtttagtttaagacagacttaacatgatgttttccattacacagtgaaaaaagcaagaacacaaaaccaggcactgctgttaggtctgtgtttcagacattgtgattactttcaaattattttaaaagaaagaagggaaaggaagggagagaagggaaggagggagtaaagggaagaagagaaagagaaaagcaggaaagcaggaaggaagggagagaggaaagaaagaaagagaaaaagaaagaacgctcaggctcaattttctgatacagtctggcacatcctgatactccctctcttttttaagcatctgtgcttcacttgctgtgacttaagaggctaaaaacgttattctgatattatttttatgagagtggcagcaagaactaaattaaaatgttttcaatttaggtaaaatcagccaggcatggtggctcatgcctgtaatcctagcaatttgggaggccgaggcgggtggatcacttgatgtcaggagttggagaccaacctgggcaacgtggtgaaaccccgtttctactaaaaatataaaaattagctgggcaccgtggcacatgcttgtaatcccagctactcaggaggctgaggcatgagaatcacttgaacctgggaggtggaggttgcagtgagctgagattgtgccactgcactccagcctgggtgatggagtgaggctctgtctcaaaaaaaaaaaaaaaaaaaaaaaagacaaaaacgtgtgtaaatggtttctgaaatcgtgttctgccttggtcattgtagatgcatccttttgacagcatttgatccttagtcattcttaaagtcgggatgataattttttttcttttttcattcttggtagtaaagaacttggcttttactggtagaactgttaggagctgaaaaacataaagggtgactagtctcagaggcagaattttaaaactggtagcctatgggcagatctggttttcagaaatgttttgtttggcttttattgtattttgaaatggcattagttgctaacacttaaaaattaggaatatcatgtaaaatccagattttttgtttttcaaaaaaaaatctaaagaaatgacaatataagaaagacagaaactggctgaggttaggtagtggttgctacctttgtactggttagactttccctcctccacctagttcttctgcagctggcttttctggctgttatctacctgaacaggtaggtatttgtgtttgcaatgtcttcattaatgtttactgagtagttagtacttcatggtgttactacggatgtaatatgttgctatgtctttacaagatacttccatagttgctcttcttaactacaagaatttataaggatccacctggaaactcataaggatagaaagaatgattatatataaccttaaagaatatggactgacattattcagactcttactgcaccaattcatataggtttcatggagctttgatgtttatgcttaattgtgtacatgattttgactaggtctatgaatgaggtatttttaaattatatgatttagatatatctcaagaaaataaagtcactcaaatgtaattaaattgttgaaaaatgaaaataccaaaattttggaaaattaatgtttggtcaaataatgcattctataggaggatggttctatgttttttcagtagaaaatgaaatagatggccaggtacagtggctcacgcctgtaatcccagcactttgggaagccagggcaggtggatcacctgaggtcaggagtttgagaccagcctggccaagatgggtgaaaccccgtctctactaaaaatacaaaaattagttgggtgtggtggcggcatatgcctgtaatcccagttactcggaaggctgagcacgagaatagcttgaacccgggaggcagaggttgcagtgaatggagatcacaccacttcactccatcttgggtaacagagtgagactcggtctcaagcccctccccccaccaaaaaatgaaatagataaaatatttccttattaagaacctgaaaacataatttaatatctgaatttatctttactttgactgaattaaaagcaaataaacaagcaaaagtgaatcaaatatttaactgaaaccaaatatttctgtctataaaataagattttactgtggaatcagttcatggtctctttaccttttttttcagtgaggaaattatgatgttaattcctgttctatggaaactgttagattatgttatctgaaggctcctaaccatttgcttggtttgattttaagactatgtactttaaagtttaattaatacaataattgaaaaaggtttgcctttagaagatgagtaaaataatttgttttcttaaccttatgaaggaaaggtgatacgtaaaacaaatgaattacactataaggattaggctgggtgcaatggctggtgaggctgaggctggtggatcacatgaggccagaagtttgagactagcctggccaacatggcgaaaccccgtctctactgaaaatacaaaaaattagctgggcatggtggtgcatgccagtaatcccagttacttgggaggctgagacaggagaatcacttgaacccgagaggcagaggctgcagtgagctgagattgcgccattgcactatagcctgggcaacaagagtgaaactctgtcttaaaaaaaaaaaaaaaaagcaagcaaacattgtaaggattaagttagaaattgagccctaaaagaagttggaagtaaactcttgacttatttggaagtttataggaatgttaagcaagaaatcgggttttctttttttttttttttttttggagacagagtctcgctcgtcactcaggctggagtgcagtggtgtgatttctactcactgcaacctttgcctctgcctcctggggttcaagcgattctcctgattcagcgtcccgaatatctgggattacaggcgcatgccaccatgcctggctaatttttgtattttaagtagagacggggttttgctgtgttggccaggctggtatcaaactcctgacctcaggtgatccaccagcctcggcctcccaaagtgctgggattacaggtgtgagccaccatgcccagcttaactgagtttctttaaaaagcaggaaaaagcactgtacatgtctaaatataaggtgataccaagacgggtgttcacatgttttcctaatgggatattttgcatgcataaaacttgtagacatggatataaaatagttaaatatctacccacattttaatgtattaatttatttccacatatacatttttaaagtcacatattacatgaagtattaatttagaaatactacttttttccacccatacagttcattgactttattcagtgcttcacatgtgatttggcatcagtgtctgtcatcaccaactcccctgttttcagtcatctcacccagttgtccagcacacatcatttctgcctaaattttttgagactcagtattttttttttttttataaaaccatgattctgtcacggttaactatatggcaaaccacacattccatttgtataatagggagacagttactttttatatgtgttctataggtgaatatgtttgatctctagcttcttaaagttatctttaatggacttttgcatagtcatatccagcatttgcaattataagaaataatttctaaatttgtatggattttttgctttgaaaaagagatcttgttagattatattacacctataagcatttaaaactaataatgttgggattgcttcagccccatttcttttctccaaaccaaactttgtttttcatgatagagtaatacagagacttggataaggatttggctatgaggtgactgtctttcctaagacattattttagggaaagaaaaatacttgccttatgcttgtatatatatgatacttacttttccctttcaaagttattcttttaatctttattaaagcacaatataatgtaataaagcagataacctgaggagaacttcatttaatggcaagttgaggtgatgttattaattttgtgattttttttcttatctgagtgcatagcacaatgtttaaaatatcaatttcttaaagaaacatttctataaaaaagatagcaagtgagtcaataaatggatatactatgtggcagacatttttaaatgaacatttccatagctgtataataatatttatgtgagctttttactagaaggtagcacttaatttggcaggagatgttatccttgtcatttcctgataaccattaactacatactacagaagataggaacagctggtgcttttataacaaaggttgattggggagatgatagagcttgggggatctaagaggatttagaatggtcagtggtttctgtcttggctatttaaagaaatgcttacttttaagaattttaactaattgaagtggcaaataattttactttctttcatatgttccatgaaaaaaatctattgtaacatttagcagaaaagaatatcacttttatgctggagcttccatcgttgtatgaaaaaatgtttatattattaacatgccaaaagtatgataattcagttctacatatattagcaataaattgtaccaatgaaaataatgattaattatcacttttatctcttaacagtggaaagagtggaacgagaaaacctttcagactattgtgttctgggccagcgtccaatgcatttaccaaatatgaaccagctggcatccctggggaaaaccaacgaacagtctcctcacagccaaattcaccacagtactccaatccgaaaccaagtgcccgcattacagcccatcatgagccctggtcttctttctccccagcttagtccacaacttgtaaggcaacaaatagccatggcccatctgataaaccaacagattgccgttagccggctcctggctcaccagcatcctcaagccatcaaccagcagttcctgaaccatccacccatccccagagcagttaagccagagccaaccaactcttccgtggaagtctctccagatatctaccagcaagtcagagatgagctgaagagggccagtgtgtcccaagctgtctttgcaagagtggcattcaaccgcacacaggtacaattagcattaaacactgtaattaacagtaatactggggacagaattgagataggttataattatttttatctctttaaaaagctttatggatctcaggacatagaattagattaattaataatccttagttaatgaaacgctattaccattgatccatgcatgaccatgattaattaactaattgattaattttgatgaggtaatggacatctttgaacccaacatgcaactcaggaccccaaatgttactaatgacttgggtatgtactctctcatcctctccatttactgtttgcagatgtaaccctgatcttgaattttgtgattatcagtctcttgccattttttaaaacaaattataaaactatgcatgcccagacaatctatttttttcccttggttttgaacgttataaaagaaataaaattatgttttataattttataagtaaagttttatttaaaaatttataaaaatccttcaaaacataaaagttagatttaagatattgataaaatgataatggatagtttacttttatttttaatgtttgagagaattatatgccaattataacactaaatgttgaaaatgtaaacagttaattcacacgtcttatttttattgagggtgcttatatgtaagacattcttttctgctagtagttcttaaactggagtgtgcatcagaatcacctggagggctgtgaaacacagactgctgggcctcatcccatagtttctgattgagtaagtctgaggttggactcagaaatggacatttctaacaagatcccaggtgattatgatggtactgatccggggccgcatgttgagaaaaacttacctagcccttatatgagtaagaacaaagcagatgtgcataatctcggggagctaacgatctagtggtgaaaaccaggtaaccagataattagagtaaaatgtgaagtgttatgagtaatgttggagagtgtaagcaatagttgtggtggaggttcatggtgagctggaggtgaggaatacttccaggagaatgaatatggtaagccttcaagaaaacagtagattaaaatttcagcaccctcgtaaatgcaaggcaggaagctaagctctatgtgggtgcaaagaggaaaaagataatgggcaagcacatatgtaaacaacactctagagtattaggttgtcaatgggttagaccttgaaggattaataaagtacagcaggcaaagatgatgaagaagaagattattattttaaggtaaagacattcataggaaagatgttgagttaaaaaatgcaggaataatttgaagacataaaacaactgatttctgagaaaaaccctgtgaacgtacagaatgtaggaatgctttcatttatctgatacctgttcagagacacatgataacacacgctgtagatggaccttacaaatgaaagaaagcatgctggattgaaacctcaataatttggaaaatacaggaatgtttccaaatttaatgattacttcagaagttaaggggctgggcacagtggctcatgtctgtagtcctagcactttgggaggccaaggtgggcggatcacttgaggtcaggagttcaagaccagcctgggcaagatggtaaaacaccatctctactaaaacagaacaaaacaaaaaaattagctgggcgtggtgatgcgtgcctgtagtctcagctactcaggaggctgaggcagaagaatcccttgaacccaggaggcggaggctgcagtgagccgagatcatgccactgcactccagcctgagtgagagtgaaactccatctcaaaaaaaaaaaaaaaaaaaaaaaagttaagtgaaaactctcactggggagaaatctgataaatgttggtaaattggattgcctgatgcaagttaacactcaaaaaatgcacctaagtgaaatgttataccagttataaatattttatgtttatcagtggttcattgttaaagagggtctgtttacttttggtttccacgtctcttgcaagaaaacattgaggtaagaattttgtagatactctttaagcaatactgcgtgagttaaataaatagcgtttttgttaagtcagttaatacattttttctctctttattcgaaagtgtgttggatctctggttgaattgaaatgtatttctattatgtaggcgatttaaatttttattagttttgaaattgtcgtatgattaatgagtcattgaaaaatgagtttttgtgctgggtgcggtggctcacgcctataatccctgcactttgggaggctgagggtggcagatcacgaggtcaagagatcgagaccatcctggccaacatggtgaaacctcgtctccactaaaaatacaaaaattagctgggcgtggtggcgtgtgcctgtaatcccagctacttgggaggctgaggtaggagaatcacttgaacccaggaggtggagggtgcagtgagccgagattgcgccactgcactccagcctggcaacagagcgagactctgtctcaaaaaaaaaaaagaaaaagaaaaaaagaaaaataagtttttgttaatggttgggattttcttactggcctcgtggcaagttttgttatctcttattatatatattctacctttttatgggaaaaactactctttttggtgtaaagatattttttatattttctttgcttgtaaagagttattatcaatttgtaagtataaaaactgcaagtatagttggtagttgataagaaaggtagataataaaacttaaaagggatggacacagattgaaaaaggccttgagtgccaagacaagagctctgaactttaacaggcactggaaaccgtcataggtcttaggtaggaatatgctgtgctcccaccatcttaattaggtcttatggaggtttgatagcaagagggtaggaatatcatttagcaggctactgcaagtatccaggtgaaatgtacagaggttttgaactaggctgctggggagggtgcagagaagaaatattttggaaataaaatggacagaaagtgtataaatggataaagagaggaatagaactgacaccaggcttcaagcctgatgcctgagaataaaggtgtaattatgaagggaatccaggaagacatggaaagagtggttggagtaaggttaaagtgatagttttagattgggttattttgacgttgaagtgttgaccaacttcttaagtgaaaatgtgcaacagtcattgaaaatatgagtttgtggggggaggggggagggatagcattaggagatatacctaatgtaaatgacgagctaatgagtgcagcacaccaacatggcacatgtatacatatgtaacaaacctgcacgttgtgcacatgtaccctagaataataaaaaaaaagaaaagaaaaagaaaatatgagtttggcgctaggaagaagagttatcaggactagagcaagagattagagatgttgtcacagagcctgggacaggaaatggaagagtcaggggagagaaggggagaaatcactgctatcaccaccaccagcagcagcagcaccagccccaggaaagagagaagaaatgccaggagatgggggcaggtggagaaggaagaagagggagacagtagtgagagtatagaggacatgcgtggagagtttccagaagaagacttgtctacttgtggaaagctgagaagttaagagagagaggcttaaaaccatgtcatgagatttggcagttggttgggagaagactggcgaagtttagagtataatttcattaaagtagtggggacaggagccagaattcaggagttaaagagtgattagctgttgaggatgcagaagtaagtacatgacactttccaaaatttggtgttgaaagggaggccaaagtgggtggacagtttggaagtgatagggggtcaatttgagatcacaggatttgggaagttcacagcatgaactggtgatgataccaatcattgtggtttggtaacggtcttcagcggtgctggaacttcaggactgggagcaaggaagaaacacagtgggactgtttgaggtttggtgctgacattttcggtatggcaggaggccaagagaggtaaaaatctcttgttcccttgactcttagctaatttatacattctaatattgacagagtctgttaacatcacttgaaaatgagtttggaggtcctgagagactctcacatgttccagacatcactcttccactttctctcgtgattcaaagtactcgggcaatatttgtgtgtccatagttgtctggactggggttatgaaaggctctggtccttttgagaaagtctgttgcatactactgcaaaataaaaattggaaggatctatcttttggctctgtattttgcagttctctgtctctgtgtgtgtgtgtgtgttgtgtgtgtgtgttcgttcatctgtccttcatgtgcatgaataggcatttcatggctagccaacattttattgcctggttatgtatacagctcctttggctaaggataaaattgaaagcatggttgtattactttggattttagaagcaaatacagtatacattttatccaagtagcatgaagcatgagagaagactcacaatgaggcaaaacaaagacagaccatattggcgagagtgtatactttgccaaggacctagactcctggaggtctgtcttctcccatataatcctttttgtctatttttatggattaatgatttttctttggcgttgccatctttcaagtgccaagttataaaaggtctaattgaagcatgaaacacattttattattttcctcctgccattaaatttgtaagatggctacacctagaaagaaacattcactttcaatcaacatgagcttgagttcatgggccagccttgaggatatcaaatggaaactgcgtaggaatgtatgagtatttccttttaaaattctgcttttaatttaggaaagcttttcatccctctgggatcataacctgttgtgtataaagcccaacctaatcaaggtagatggtactgacagaatgacatagtttgaacttaagcaggaggtcagcaggcagattgttttttgctgtatgtactgtagtcactaacagccggactgggcagctggttttaccagcagcattgttaaatggaaaatatggtatattatgccccatgaaaccaaccatagattttccaaacgtttagacttttttgagtggagtcagatgtttatggatgatataatgacttgccagctataataaacaaaaataaacattgtagcatatcctcagtctattgaatattttccagaaatagttcatgatctctattattcatatattatcaaattcaataaaaagcattttaatacattttgtcaccttatattttgtgttcctggatttgtgcttcatggttataccaagagcaaatcgtgtgtgttcattttgtcaccttatattttgtgttcctggatttgtgcttcatggttataccaagaacaaatcgtgtatgtgtgtgtgtgtgtgtgtgtgtgtataaaataaaataatatgtaaacatttacaaataaacctggaactgttagaaaagaaaaccctgcccagtttttcatgtttaagatttccagatgaaaaacttaaattcataataaataacatttcaaatgtcagttctccaaagagaaactattaattaccctgttatggctgattcattgtcaccatatcatttgatgatgtaaaataacacagttaagagaatagagccatattttcaagagcttctttttagtttatttttattttaataaatatgtcttttaagaatataaaatgtatttgtttgataaaatgatgccctatccacactttatgacaaggtcatggcatctgctggagtcagagatagacagccttttgccaatattttattatttatttatttttatccttacatttctcttttggtttgctaacagaaacatacatggtctaaactaggaacataaaattgagtcacttgttctggggtagggatacagcacattagaggtcatgcaatgccaggatatgggatctccagcatgagcctgagactaacgtgtttctagacacagggtgtggctgagccttgtgtcctgtctgtgccattaggtcattatgaccttatgtaaaataagtaaaatacattctgagtatcaccactcttttttttttttttttagctagtcttttgaaagatgagattagccctgctttctgtctctgaagacttttatggcaaatgagacccagtgaaaacagtaaggtgaaagtgataaggcattttctgacctggtcattaatattcaggcaatcccatgatacatttctaagcactttaacctgtggccacaaagtgagatggatgattttacactggaggagcctcaggcagataacatcccagctctgtttttgatgctcccccgcctccccgctccccggcccatggttttacttctgaaagcctgcgtctgctgttaggcttttccgttaacatctctccagtttgggctactgattttctctgctcatcctggcagagttggaaatgcttaccaccatctgatgggtacaggaggatgacaacagggcagctcccagcctcctgtagtagcgacagctctgaagcataacttccactccagagcgctctgcaggaccaggctgaagctgggactttgcttgcatttcttctcttccctgtcctgcttctcacactccctcagcagtttcccttggaagtccatcttaataaatcactggtgtggtagtctctatctgaggatctgcgttttatcccagattataggtccacgccatttccagcctaattggtcatgccatagggtagtagtttgagtaaaacctatctatagttttatgtctactttctctgcaagtcaaaagccatatgttgttatggaactagtatagaattttttactcctttcttttgaaaatattatcagtattattgtttaaaacctatgccccctatagctctgcaattcaatgggtcagtattgatatagtccagactgacttatggatattgaatgtggaggaaagagagagaatgaataaaaatgagacagaaacagacgttggatgtaaggccttatgagatttaccaaacttgacttaaatgaaaactgtccttactgggtccaaatggtgaattatgtgattctgtggctttgagagtggctttgcctctcggccctactcctcctgtgctcctgcagtgatgcacatagtgtctgtgggaataagcagctgtatcaggtttccttttttttccatattcgttcttgcttatatcctgaatttattttagtgctgacatagtttgacttactaggcctatgtacatgaaatatgttgcttgactatttaatttgtttacatctttgccttttgacagtgtgattatgaattccaaccttaagcattcttttgccctttgttactttgtggactttaaaaaattaatcagggatttatgccagtatggaaaggtttatgacagtattttaagacttaatattactgagggatggttgtagaatgcccactgacctataataagcatgatttcataaaatatgtacagcgaatcttccttaatagataaactattctctaatttatttgaaaatccaatgacctacatattcgtatgttcagaaatcccccttttactaacattgtttctcctctgagaccttccatctgagcaaatctgttaaatgaagtagaggaagctttgatccaaactaggctaaatccagtggaacggatgccctgccacatgtgaatgggagcattagaatgccaaaaaagggaaattaggtgcgatcctcatatcttctctataccactgtctccttaccttggtagcagagttcaggaaacatccttatgcaaggaattagcaataagaagactgtatcatttgaaaatgaaacatttgccatactcattatttatgttgtatggggtttttttctgcctctagcacatcatgccataattaagaaagtttcaggctcattttgtgtctcagctagttcttctgagccggttcttggaaacatgttttcagttgcaagtacagatgtgttttgcaaaatgtgctattcttttgtaacagtaagtctctaatttggtatcttgctccttcagttcattgaaaaagttgtagagttacacaatttgcaaccttacatcaaaggccttgcttgggaaagctgtgcatcctggtcttacgtgatagagaacaggattttaaaaatcctttgggaactcattttgttgacctgtcctcatttgactacttttagtttttatgagactttgcaaaaaagtctgcagtttactcatcaaagccacatcatttgaagaaacttaagacaaggatcataaatacaatttatgaagtcactcagcaactggagaatgttttcaatggattggaaaattagattgaacgatgtatcaggaaagctgacagtaaggtcaactgctaaaatataaacattcatgtgaaatggcatggcttttgcttttatgctctgttgacacagtgtttatagtatattcatgccccaaattattaaggttaaaaatgactcaggacttactaaacattatattttgaagtggcacagttaggaagtgatatgtagcaataacatgaaaatcctggcaaccaaaatatttgggagtctgagcttcagtgtgttaccagtcagttttttggagtagaaacttctcttttaactcctttgtttgagttatacatattgttagccaaaggttggcacaatttaatcatacatacagtttatatttctagaaaatttgacctttaaggtattcagaattctgtcagcctacgtctggtctcagtcatcattatttctcactatccaatagagatacaagcacccagcaagtcatagagtaatagaacacaatgtaaatccagggatcttgactccatggtccagtgagctggttataaaatgacaaggaaacctgtgaaaaaaggaagtccacacactgaaagatgagctgtaaatatgaaatgccgcagatcaagcatgaacccgttattgagttttgaagtaaataatataccctcttttgatttcagaacattaaattaataaagtaggaagagatggccctggttgcttcataaaataaacagtctttcatttcaggatcactagcttgaattcatagatttacagattataataatattaatatctcccaggatagcagtgtctcaaagttattagattgcttgagggtagccctgtagatagcaggttccctttagttccccttgcacatataagactatctgttgttaattggcacctttttcaggcactcagccacaaaacgtggattgataggtcagagggctcatctaaagagacttggggagatgatggctttgtttgtgctctgcctatagagaaggctaatttagcagctgtcaaacatatgcaactctcctctcacttctaaatccacctgaagtagagacttgtatgtaaaagaagacctttcttttctcctttcacaaaactcatgcaagagaatcagaagaagcaaacatgatgacatactggtctgtcttgttctttctttctttttttttttttttttttaagacagagtcttgctctgtcacccaggcccagaattcagtggtgccatctctgctcactgcaacctctgcctcctaggttcaagcgattctcccacctcagcctcccgagtagctgggactacaggcatgcactgccatgcctggccaattttttgtattttagtagagatggggtttcaccatgttgcccaggctagtctagaattcctgagctcaggcagtcacccacctcagcttcccaaagtgctgggattacaggcgtgagccatcactcccagcctatcttttcctttcatccctgaccaatgtgcaaagttcttaaaaattagttgccagactcattatagaaaattcaggcttctctgtttttactaaagaaaactcacttttggtaagttttataagcttgtttcaccattctctaacagggaatgattgactcattttacacagatagaggtctctatcctcaatgaggacttttacctctagtgagtatatttcagtagaaacctgcacttttttttttttcttgtttgtttgtttttaaatgaaagtcttgctctgtcgcccaggctggagtgcagtggcatgatcttggctcactgcaacctctgcctcccgagttcaagtgatccttccacctcagcctcccgagtagctgggattacagccatgtgtcaccatgcatggctaatttttttttgtatttttaatagagacagggtttcctcatgttggccaggctggtcttgaactcctgacctcaaatgatctgcctgcctcggcctcctaaagtgctgggattataggcgtgagccaccacatccggccgaaacttgcacttttaatgtgaaagtccattgttgtattatttaactagtctcccgaaattctgagtgatgttatatttacagtatgatttttattaaaaaaatacaaggaagcactagctttaaattctgttatttatatatttttcaccattgctcaattaaagcaattttaaaaatatatacaaggcgttttcctttcatggtcatttattgaaatgatgaccatttggccttgggttaattgcatatttgctcaaataaagtgaaggaagtttaaaggccagaaatgctgagagaaaaatataattgttatcaatttgaaattactaggttgtttcaattctgtatacagttctgtgtctaaaattgtcagtatagactgcagaatttacttccaaagttctctgactgcaatacctataagaaatactttttacatcatgagctggtacacacccccagatgagcatgtgcacacacatctgtatgtctgtctctagctatatctcatttctacctctccctatctgtatgtttctaaagcaaaggcttcatgaaagaaaaaaatccttcatggaacaatgctattaccatgtattaaacactttggtactttgtaaggttttttaattccaattcataatagaaagttagttatgatatgttaattatgatccactaataattatgacccatgtttgaacagtgatacagattaaagctgatttttaaagatagcaaagttacttagagaaagaaagttgttttacttttctgaagtataaattgaatattttaatttagtgttacctagaatattcatgtggtcattttgcatcatataatttattacatttttctttataccttctctatgtcaaatagttttaattattccatttcctgtaagttacttatattttctgccttctctatgagaagacgtttagcaaaatataactagagtgtcttgaatatttaaagttgtagatgtaaaataaaaattgtactgtgatgtttatgtatttattcatcaaatattaagtattcagaaactatactaggcatcctaacaatggctaacattgattaaactcttagtatgtatcacatacagttagaagctctctaggggaccctataagggaagcagaattattttagttttacaggtgaggagactgtgccatagggagattaattgatacttgtccagttagagcccaatttcgaatccagcaagtctgacttcatgactcatactcataactactttattctcaatcatttctgctaccacagagtggaagatgaagggcataatcccttcttcaaagaggtacaggggtaaacagactttcaaaccagtaatccttttgtgaaatcattaggactgtgacgtgtcccatgtgctatgtgagaacagatgcttttgaccctgaaggtgattaaaactaatgcagaaatatttcagcaggaaagaataatattttgtaactgtttcagaaaaagtcagctcaagtgttaatagactgctttgcttatatctgaaggcatctgatacatttgagatataaatattcaataaatgtatttgttttgttttaggaaagtactatttttgccaatgttttgacaaagtagccaaagctagtaaatttttggggcaggttgccaacagttgttttacggaacattcatggaaactaggaataagaagggcccagaactttgtgaatgaaatagtcatagtgccaggtacttgaggtgtgagtagaaaccatgtatgtgcccagagctgaagaacactactagtaaaacgtttccaaagggaacctgttcagttctgtttgctttcactttttggtgctaatgtgttttataaattttgacttggattgtgcatagcctcttattccagtacctaagacttcctagagacaccaaggaggaagggataatcattacgtagattaagtatgcaaaaacaaacaaacaaacaaaaaacattaaagttgccaggaatctgattttggctaatttcctctattgtacatgctcaaatgtggcttggtcaaaggtattgcagttaagggaacacagactgttttggcttcaagaatgctctgttgtatctactcactttgtgttatgtgggtactgtattctgatgtgaaagttgccacaagtgaaattttattgtatccacaaaaaacaaatctgtgagacaagtgttttacttaataaattacagacttagggtgcctgaaatatttgctctaaaatgaagtttgcatgacccaaaatttcagtttcagttatcttgttttcagcaggctggatgaaaagatcttgagtataatgtgagtcatgttttcaatatgtagtctccagagcctgctgttcgctgttcagcaaagataggactcccactcccagaaatttaaaaaatatgcatttgttgccttcttagaaccattcctatatattaccaactggccgctaagtgcaaaatatgcagattctgcccccaaggagtttactgtatcatgggaggaaggttttatagtagcacagtgcaaaagatgtctcataaatgtgaggtagaactattgctgttttggttcaaaggagggagaaagtatttccaattgcagtgtactgtacatacatatacacatgtatacctagtcttttagtgctttgcagaatatatctctatagtaacaacatttgtctgcaaatgttacttttgtatatgcatttatatttgcagaatacattaattccctttagatgctcaattctatccaccccatccgacaaaaatgccacatgcataggctgtctttcctaataaagaaatattgtaataaaagagaggttttattaaactaatgcaataacgacattttctttgaggatttaacacatcatttttaataataaaaatcaaattgtcattgttgtgccctgtataccttttattcaaatcagactaagtactctggcttcgtggctaagcaatgctctggggtgtgggggatggggtgagtatttttagcattacacaaatgaatttcagcagccagattcatagtggggttgtagattatgaatacagaacccagggaaacctgttaatattcgtgaactgagggggaaatgcctctcatgagtatctagaaggaaatgagagactggaggttaggagagaaacgattttgttgggtcagctttcaggtagtaggataccagtactttctacagccatgtcgctgatttaaccgctttggctaactctgaattgaccactgaaatttaagagtttattttgtgtgattagactaggtttgatatcacatagttttcttaagaggttaccagttttttgctttcatgtcagctggacacagatattttagaattatgtgaaaattaaggctagcaagcatacaaaaggggtgaaacatgaggaataagggaccttatttggaaggaacctttttttttttgacatttcaagggaaacgtgataggttatccgggggcagggtggatggttggcccatatgagtgccaaggctccttccacctctagccttctgtaattttaatctgtaaaatgggaggatgtgatttgttttaactttactaattggttatgacaccaattgtttaaagcaatatgtaattatgaactaaaatacattttcactaacatgttctgaatcatatacctttaaagagatgtaacttgatttctgaagatgagtgtcatcccagaattaataattaaaatataatatgaggggatagggcttattttctctatctagtccaaatgtttctaaagaagtgctcagcgtatgattttacttttagcataggaatcagaagtacatctaagctgtctttgagatttacatgacatttgaatgtttatctttgttcacattggaacctaacactttcctactatatcctttctatgataaatgaatattttttggatcaagttacttcaaaaggtacatgttttagtaaatagatgagcattgcaagttaccagttctacctctcatttcaactgccacaaacagaaacaaaatttccagaaaggaaaacagtctctagctagcttgaggctttttccaaagggaagtactagggtttggctgggccagtttcctcagtacacacctggtgtatatcactttaaaaaataaattatgcctcattaagttacaattaaatggaatcgtgatcatttgtttttctggaaggaagatgttttgcatattgaaagcctaatttgttgcaggtgacaaaaaggctgaacagattatctaatatcacttcattttgggggttaatgtttgctggttagcttgtgtatacttcagtagttcagaatcatattaatgtagactcttattatatttttgcttcaaaatatcttctaccactttatcagtttttgcactttattttacagcttgtaaggaaacagaggcttgtcttggtattctggagtacccatgtgcttgctttcttcaaatgttctaatactccccagcttcacacgctgcccaatattcatcgtaactttatatccatgtactatctatatttaaaattccagctaagttaagtcttacctcttccaattttttttccctgaatcctgcagttgataatactttctccctcctttgagccaaggtgacactagttctggcttgcattaataatgcttggcatcttttacattgtgctgctataataccttctccttcccatcatatggtaaactcctgggaagcagaatctgtcccttattaagtctcttcatccctctcagaactttgtattcaatcataaataagaaatgaattaatagactgatctgtttttttttttgagactaggtatattgaatttgggggttccctagataatcaatgggagataatggatttaggggcttctgaggtaatccatgagagatatagcctaatcctagggagttacctatggtctgagagccgtaaagaacagatatctgttaaaatctagtcagtaatgactttaactgttgctgtcaggagtggcatgtcaggcttagcattcctaaagcctggcccaggtgtgagttctcttattgctctcttccagggttaaaggcccatcaaaggtaatttctcacctgtcccagacaagatgtcaaaagctagtgcaaaaacttggaagtagattttatagagccagtcatgataacgtttcccagacttttctgaatatcagcatatattgtacatgctaacaatttgggacaaactatataaattgttaaggaagtatggaaatcaaaagctcattgacacagaaagtacagactcagaatctgtaaggtcatttaatttgttataaagaaatattttaaaatactagaaaaaaataagggcattaatttttcatttaaaaattagcctcaattctttgttttgtgtgtagaggtagcaaacaggctaaattatgagcaagctagatggcattataataagttattgctcatttcgtactttgaattattttgcttttaatgaatattttgccaaactcatgtattctttggtggtcctggaaattatatgaagcttgcaaaatgttaattaggctatggaaaaggccaacttccttctttttccactgacttgtaacccaagaattattttggagggtatctctctaccttgtgcagatgttcattctgctccttttagtcaacatgtttcctggtcttacataatctcggctaacactgtggagggaattgttttaatgtgtccctggagaaggttctgttgcctacgaggaggaaaatacttaatgatcactttactcaatacttgcaatatattttaatatgattactgatatgaaagtttaataagctatatcctggttaatttattaatttccctccatttgcacattctcaatattcatgacctttctattcataaaagtgcatctttttttcagtgcccaggtgccgcgccacattttctgtatcccaggctgcataatgggaatgtccaagtgacacctccagcttggctggttgataattaaaatgccagatgacatagtggcaagggctttagaaatatttatgtgagagataaattattaatttatgttctattcaagacagtttcaatatgataaacatttacttatcttgataattaggtggggtgatttgtggtatgtgaaagttatgctgtctattttcttctgatttttttctcctctgatgattttcaactaacgaaatagactcactttccatttataagcatgcagaatttggactacatttttaaaaaatcccaatttaaatagttaaaagcacataaataactcaaatgaaaaagactcaacaaaacaactaaaactcttcttgtgcccaccagtgagccacttgttattgaaaatgtctgaggtgaaaagaatctgctttgggaccatagctacacatatgagagttttaataaataatttaaaacagtgttctgattctctgggggtaatatgtggaggtgacactggcttccttgttggtttgagactttatcttcaattaggcaaatgaaacagaggaaacagtatattccaccaccctttaaaaatacaaatattgtgtctctttcacctcagaaatggttgagcagtcattctcaaggatacttcatattaattttccttggagatggattaatttccctgtaaggttttccagtatgtaaaaaatgtaggagaagaagctatacagtttcaaaatggaaaaaaaaaaacaagaaacaaattaaaacactctgtgttttaaaattttttttattgattgagaatgaacaaacataattttgagccatggtccattagaacaatagttttgttatgtcactatttcgtatccaaaatctttcccataataaactccacaacttgttaaaataatttcacagaggaagaataggtttataaactttgcctttgagatctcttgagtataatcataataactaaacaaatttatccgtgttgaccctaaaactccttcaagttttagtaatttgaaatttattgaaataccaaatttatgagagtgaaagggagaggaaggagggagaggaaaaagaccaactcatcctttatatgcagaatttatcattaaagaaaactcaaaaaatatcaaccttagtgttttttactggtattgaaagttgaaatccactttgctcttgcttctctgcatattcatttgaagatttttatcttcaaaacaaattcattatgaatatttcaggttgcttagtgcaagtggaaagtaggatagctttaggcagaactgacttttaatttcagagagtcgatacttagattgtatcacattttctggaagataagtgtctcactcgttgcttctaaaagcatgacaagaaatctggattgttttaagaatcatgtaccagtcggttatttttacatacacatcctaccttgtccccttcttgggcatgcatgcatgcacacacacagacacagacgcacacaaaagacactgatctgtagcttttctaccaagtattacttagaatttctctaatcaaagtaacatgacatccaaattgtgaaactgtcagatgacatagtacttgtaagtttcttgtagtaaaattgactatgtgatgttctgagtggtgattgcttccttggagtgctatgtgatacagttcctataactggcatttgcttcgctatattataatgcattgctttattttaaaacattgcctacctttccctgaagatttttggacaactagagatagcatattcctcttacatccattgccttttcatatttaagccacatattagaaatctgatagtgtttcctttgcattaattttcacctgagtggaaatgtctttggcatctgttctactttactacagttaaagaagtgacttttcatgatttcagttgccccatctgttctaagatatgggattaacatctcaggtcttcccaggaggataatcctaaaccctgttcttatactgctctgagaagcaatatattagctgggaatataaagtgatgtctctgtgtgataatccaacaagtgtgcagaatggaaatagacctgcacctacccccagtacgacaatgtcccaccttagatctccagcccttttctggagtccatactacttttctctagacttggcagcattttccttttctttgtgaattctctgtcgtcagagcacatgaaaaccctgacttcctatttaaatctttctatttgggtgagtcacacattcagaaagtatctgggcctatcatggcattccgtgcacactgttattacagtgtgctcagcccctcgccagaggtgacttcattttcattgctttaatggtgacattagggtttcccccatgaagacgtctcatgaaagatttgggtgccctttgtacatatgtaaggataactattgtgtgtatagattgggaaattatcagagggttaacacaatttagccatttgctttgcgtctttttttttttttttttgcataagaaatatctctattgaaaacagtggccggtcatacagaaattcagccagttttttttttaaattgatgtaaatctaccatgctgtttaaatgtcgaaactaaatttaccaaacttggcagatttgtaaagctaagcaggactgccaagtgttcccagtttcaagcagagagagttctaacagttcctgaaatacttgtaggaggcacctggtggtaattgcagtttcacaattcttcccaagtgcctaccttgctagctggcatgtctgtacactgatgattattacagtgatgataaagtgtcagaatagaacagtcctaaaataatgcatatcccccggaaggcaagcacattgacttcatatcggagaaccctaaggaattagtgtgaggttcttgacatcacagcgagctggttaaaccaaacaaaggaggagaggggtggaagacagaaaccacacacatatacctgcaaatgtgacttggtctgtttttttcccccatttaatcagggattgttgtctgagattctgcgtaaggaagaagaccctcggacagcctctcagtctcttctagtaaacctgagggccatgcagaatttcctcaatctgccagaagtggagcgagatcgcatctaccaggatgagagggagcggagcatgaatcccaatgtgagcatggtctcctcggcctccagcagtcccagctcctcccgaacccctcaggtgagaaacttgctttccgtatttttcactctttgtcttggaaacatcttgccttcactagttactgtgttttccctcaaacattgagagacataattcaaggatttctttcctttttttcttttcttattttattttattttattttaatttttttgagatggagtcttgctttgtcacacaggctggagtgcagtagcatgatctcggctcactgcagcctccgcctcctgggttcaaggaattctcctgtctcagcctcccaagtagctggcattagaggcaccaaccaccatgccctgctaatttttgtattttttgtagggatggggtttcaccatgttggccaggctcttctcgaactcctgacctcaggtgatccgcttgccttggtctcccaaagtgctgggattacaggcgtgagccaccgtccatggccaattctatgatttcttaatccgctgaacatgttggtcagaggatatgaacttctgaccatatatgatcccatactatatttctgtccctttaggaagtcccattcttccatacgtggtaggtgaggggtaggaaggtaggagtgggcacaggggcgggctctaggatgtttatacatagctgctcagttaggagttagggcatttgtgttgaagctgagtttgcatagcaagcacactgctttccctcaaattgtatgtttatttggttgggctggatggggtagaggtggctgagggcagggggcagagggtagttgaagctctgttttatgtaatctgaaaaagacaaaatggaggaacacttgcagtggaagcatgcatatgcagtgtccagatcagaatgactgagatgtcactcaatgatcctttagaaaatgatggtggaaaggtaggccttaattattttccatcctaggatgatctccccacagaatttggtgacttccattcttcctctccacacacttgaaaagtattcttttcttaggccctcatgcaaatgtatacatctagtaatgtgtgcttcaaagctcctaactcaagggtcaaggtctcaaggcagtcaggggtcatttctagttcacatccaagcccactcatttctggcctatcccctatttcccctaaacttttactactcgatagatttatgataaggccagtccgttcactgttgctatgatagttgcaggttctgtctgagtgctaattctcaaaaccagtatttaacaggtataaattttttttgtttgtttttgagaaggagtctcactttgttgcccaggctggagtgcagtggtgtgatcatggcttactgcagcctctgcttctcaggttcaagtgattctcctgcctcggcctcccgagtagctgggattacaggcacatgccaccacaccagggtaattttttgtatttttagtagaggttgggtttcaccatgttgtccatgctggtctcgaactcctgacctcaagtaatctgcccacctcggccttgcaaagtgctgggattacaggcatgagccaccgtgcccgacctaatggatatacatttatacaaagctgaaaaatgggcggttcaaaaccaaaggttgttttgcttagatattatagctttggttttgcgttttctgataaattctaaggaactgattaagcatagaagcagaattgtatcctagtagaaatatttgagctttttcaagtatatccattttttcacacattttaactctttttatatttttgtactctgcaataaacttttaattgaagattactttctatcatgcactgccaaattgtgttacttacacttcagtctttagtgaattatgagttttagttactgtttgaaccaaaaataagtctcttgactgcttactttggatgagtataaccaagcatttttgtttacttaaaaaaaaatctggggacatacatactgagctagtaagttgggcaagttgttaatgtgcactaatatttacttctgctaaattcatcaatatttttgccacttttgaagcccattaaaccattatagaagagcccaggcatacttcatggccatttgacaaggcagctcttcttagaaagttacttctgcttgttagaaattaacacaggtctgtgtatttgttttcagctcttttgtactattttcctaacaagattatatatcgtaggcaccttttcaaagacctaatagctttcagtgccagactgacttacaaggccccacagttagggtcagtattttgcttattttgaccagaatgccatctagaaaattcatacagatgccctttagggataggtgtagcagggaaatctcttatttaatatcacagttttgatatttttgaaaataaatatttaaacatgtttttgagaatacggtcatggcattgcatttgtacattctctagaattgtctttttctcttgggtaaagattgagaaaggagagtttattaaagtcttttaaaacatttcatgattactgacttaaaattctttacagtcatatctcaacagtaaagatcgtagtacagtacagattttattgtgagaacaagtattagaggagtactcactgactcagccttttagttggagtcagcaatttagtgcacacaagcagcttgacattgatgcagggagattattttccagaccccatctatactttattagtagctgaaaaacaaattgaagaaatttgaaatttgaaattatacctccagtctctttttatttcttcagctggccagcattccatggtgtacttaataatgacaaaacaatactaagataagaatgatcatttgttaaaacgcttactgtgtattaggtgttgtgaacattttgcatgaattcagttgtcaccattttatggtattatgcccattttacagatgagggaactgaggtttagatggattcagtaacttgtgtaagggcacatggctgaggggtttcgtcttagccctcatggttggagagaaggcttgaccaatcaggtaggatgagatagtcagtgaggcaaattaagaaaactgaattgagaaagggcagacatgctatgctaaaacgttctcttaacagggaaagcactgtgggttaactagaaattttgagcagaacaaatagtttattttaaaaaattacagataattgaatttttaatgggaaagtcccaacatagcaagaaaattcttacaacagcacctggcataaattggagattttggaggcagtgtgtagtgcagtgtcctgagcccatgtttttgagcctgaaagacttgcgttcagatcatggttccttcactggctgctgggtgtcctaggttaagatcctcttttatttcagtttcttcatctgtaagatgaaaataataatatctaactcattggaatcttaaaagaattaaatgtgaaaacaaatgttaaaatgctttctggagtacctggcccataaaaagcacgccataaattatagtaattattgctttgcggtaattagaaaatagtatgagagaaggaggtagaagaaaaatggcagaagttactgagcactgttaggaagcaaagcctttatggaaacgtagggccttaagttctgccgctagacaccatttgtcacagagtccacactgcctgttacatctttctctggacctgcatactgctggatccagtagagaacagctcagggcatccgcacagggaaacttgtgatttggagataactctgttggtttgagattctagggtgaatggggacaaagagaaaaaacccaggttaggccaattcggctggtagtgcacaaggatcaaggatgtcttttcctgaaatcttgctgccagaggttctaagaaaatgtctcagccctctcttattagacaccagcaatgcattctagggctcacaccaagtaaatgttatgaccgtcttttggattaagtagattcagacattttagggttatcctaaccccaagaagtacagacttctatattgtccttcatttgtctctgaagctgatgggaaatcattcaattaaaacgagcactgcagaatacataaaaccgcaatatgagtttaagaaaatgaaaacggcacatcaaaggcattgtgaagcctagttttatgaaatgaaattttgtttcatttccactgatttcctaggtgaaattaggtgactgtctgggtagcataatgatgataatgatgggaaaccatacatactcgaatgacatatgtaaagctttaataaagaataagagagacttgggagtgcattaaattgagtaataatttattatttagagacctctacccatttacttattttttttctggaagaattggctcttattccaaggtgtgccatttttagaaagaaaaggttaactgtgtgtgtgttctgcatgtttgttttgtagttagatggttgcttatagtttggtgtctaggagagccatcctacctgtgaaccttcgtctgggatgctgtgagagaacagggttgacaggattctgcatgtcctataggaatgcactgcaattatttccaatcacaattaacctgattagaataatggacaggaagtgtccctctgtagctaatgcagtttggcatcagctgactgaaatcctttgataatttctgcacagatggctgggctgaatgcagcactttttaaattattattttcatggtctcttggtaggccaaaacctcgacaccgacaacagacctccctattaaggtggacggcgccaacatcaacatcacagctgccatttatgacgagatccaacaggagatgaaaagggccaaggtgtctcaagccctgtttgccaaagtggctgcaaataaaagtcaggtgagtggtttttaaaaaagcaaaatcgagggctggaattagatccttctccttcctccaccaataaaaatacatctgttcctataataataataacagtaataacccccaagaaacctgtcatgttctgccttttactctagtttgcttttattcccattggagttcaaaatagagatgaagccaaaacttgaccttttttcttttaaagattaaaaaaaattagcctcgaatgatttctctccttattctaaacactgcaatgtacccttttgtttctctccctttatatatgtgtgtgtgtgtgtgtgtgtgtgtgtgtgtgtatgaacaaaacttagaatgtatataacagcacctttctgagaccaagttttagccaagtctcatcacctttcctgttcccacaaggggaatgtccaactctgttataataaccacttttccccagccccagagacaccttttgatgtcaggtgtttcttttatgtacagaatacagttgattttttcaggagaaaacacacgtggggggagtgcagagtaagtgctaaaatcttttaacagaaaaacacagaagcttatccagtaaaatttttcagagttctgggattgtggagaatgtaatgctctggggaaaagagcagacagatgcttaggttttttatttctgaaagcagcaacagttgatgggatctactatctgcttcaattcttcatttaaagggacaacttctgcccaaacctagaatcctaggtttgaggtgcatgctcacttatgtatacctagggcgaacacctaatgcagagtggaggaaataaaagttagttaaagcataattttgagagtcctttgattctgagcttgatttcctctgtgtccttatatgacaaatgttttcatccctacatatgtaaataatcaaatggttgatcatctccctaacaaatcttctgttgtgtgctataaagaaaggaagtgactgagtattgtatttctattaagcaagaaggttttcaataaaaattaaatttttaaaactgaaaaacttcaaactgtagttaaatgttatatttagattaattatagagtacagggttagccttctttacctgcagttttaacctgatataggttatttttagatgttgataaaaggaggggagtagaatatcaaggaacttggaaagggattgaaatgtttgtttcccttttcaatttcagtgtagtaagttttccagattactctgactttctctcttcaatgaaatcagtgaaatacagtttgctaagacataatgtccaaccatagtatgaaatacatgaaaagaaaataccatagagccttcttaaactgttaaatgcataaaatcccatgtaccacatggcaaaatataatgagagttggagctgttaaacgaataaagctgttaaatgcataatgccacttggcaaaactactgtgcatttaatggttttccactgtgtaataaaggacatatgtggtaaatgtgcagtgagtataaaagctgcacaattgattttgcaaacctgccccttagttgtgacttgatgtaaatatcaaagtttcacacagtccttcttttataagcagctttcaagaaaaactgaagaccacagtctgagaacttgattccaaaagcctgtaatcttcctgttgatttagcagtatggcttttggaaatagtgatgcctccagcctcctaaaataattcaggtagctgattgaaagctgcttttgccaactggcagaagcttagctctccaaatttttgatgtctcctgaagaaatcagtagccctgatttcgtagaatttggagaagaacatagttctgggaattaatatgctgaaggtaagattgagcttaagtgaggataagatgctttgaggttgttcctttttcactgggacaatgatctcattttcatctatgagtggggaaccttattgtaaatagctgactagataggcaattcaggcactatgtttattatgttttttttttaaaaatgatactgccaaacaaaatgaatttaattggcagtttcaaaggcaatttaacaaaagatattcactccattttataagtatcagtattcatttgataaaaagtacatttagtgaaatcaattgcatgatttggtacatggcatatatatttggtggctatccataaggtgtatctatgtgtgtgtacctgtgtgtacatgtgtgtgtatgtgtgtatatatatacacatatatgtatatatgtatatgtgtgtatatacatgtatgtgtatatacacatatatacatgtatgtgtatacatatataaatctataaggtgtatatatgagactgagatatatatatatccataaggtgtatctgtgtgtgtatatagacatatatatgtctatgtatagacatacatatatatctatacatagacatatgtacatacatatatgtctatacatagacgtgtatatatatgtctatacatatgcatacacatacatacaccttatggatatatatatcttagtcatatatatacaccttatagacttatatatctctcttagtcatgactaatcataggacttaaccttttcaagctgcagaggggagtggccacacccactccattgtattgtgaggacggagaggaacaaagatttttctcttcccttgcattttcttccctccttttatttttctttggagggatcttaagttcttgcagtgactgaagagccaaatgcaagggctttcccttctcctgaaggtgaaattagggaaacaattaagtagtcttgtgaactggagttgccttgaatccctgaaggccgagttcaaatatgcatagcaaccttctccttccatttgaaatttatatgacccctccattaacactccttggtgttaattgctgtaatcagctgttaacaataatttctaacactgccctgtgtgttagggaagccttgaatggggaataggaagagggaggaaagttttagagagagtaggaatggtggtccaagagggtcctcgagggctgtaagtgtttaagtaggaaccaggcacaatgcaaggataggggttcagaaaaggagttgaaagggtggcaaactggttcattgtgaaaatccattactgggaagtgtgtgtatatgtttccctagtgtatgggttacatgaggatgcatttgtagggtcccagaccacctcctgcagctcagctctagttagtcccttggtgattgctaggccagtccatcatccacttccattaggtatcttctatcaggcccttgcccctttcttcgtgggaaaggagtccaagaaggataagaccagagggaaagacatgtttatacacatttcgccttgtacttttccttcattttctatttaggaccagtttagtgttttaaaataattttctgtgtgtgaattctgaggattaccttccttttctgtctgcagaatactcagatcatggaatagaatgacagtggtaattctctgtgaattaggagttaggggttcttagtagaagccataatgtaaaggcatatggagcgttttctgtgtaactccagtctgaccctcacatacaaagggccaccagggagcgaatgccccacattctgtctgcgtggccacaggaatgccttgttcctcaaaagcttctgctaatcttgctggccctcttctgcagattctgtagggccgctttccccctttcttcccaattttacccaatcacccgtgatctgggttgtagaaatctagaggagagaaaacatagtaacctgtgggcacatcttctgcggctctcaggggacggttgtgtactttgacaacatcctcagccacatttctctcccttgacatcaattaccccatttcccagacactgattgtttttttcttctcatatcctgctatcttctcccttttatgggctacgataggttagctcatagaatgctaaggatcatctgactttttttttttctttgagaggagagttaatctttattatttattattattatttgtatacccgaagactcaacactacatatgtgattgttttttcctactaggtttgggtaaaaatagagtagggagagaaatggaaaggggcttatttttaatctctgttttcccttccctccattaaaaagataaaccaatgaacaaaaacttccgaagggctgtggacttgctttttgtatcaggaaggtggagagaaactgatacaccctgttctgttccatacagacaaggggaaaaagacggcctggttttaaaccccagatggtgataatgaaagggggtagtgccagagcctgctgggataaaagaaaaagggtgattttggaaccaacagggaaccaggggggtctctggtgagatgatattagtaagatgtcctcatctttacaaaggtttaaagacctctgccaatcctccatgctacctatgcccttgcaggcccactggctgcaggaactgccactaaagtcaggaatgagagagtttttcttcctactacacactttagaatgggaggcataattgtgatcccattgtagctaaaagagatggatttctggcttgtaatacacaattctaaaatcattttccccatagaaactatgacctacatggtgattgggtttcagtatgttctatgcttcatgtacattaggattaagtggattttgtgtactgacctttatgccttagcactatgtttctacaaaaaaaaaaaaaaagtttcaagttctcaactacttaacaaattgtattcctaagtgagagtgtacttatgttttagatgtagtttacaagctcagattttatgaacattgcttttttcttaaaatctctccttataggtggtctaatttgcttgacaggctaaataatttaaaacatctaggtctctgtggaagattctttttatataaaagaaaaataaaggaaagagagtaattaatttttgtttttgcatctcttcttaaaatgtctcaggtacatatttatacattttttaaagaaataatttatattttgtgattacgtaagtaatttaacagcctcattttaaaaaattcagaaagtgacgaagaatatgaaagtgaaaacatggatcacccatgatttcatgacccagacatagttagtattaatattttagaatcttttctttcaatgtgtatatgtttgcatgggagtatatgtgtatgtttatgtcctaattgatatcgtaactgtgtaacacataattatgagacaagttaaaactataattttttaggacaacttttttatgtaggagagtaaatttacaaaatataaaaaattatcttgtctcattacttagtttcctagcctttaaaaaatgttgcacaaagatcaaagttttgccattttgcacaaaaagtgctttaatgttgatcttatattattaagtttccattttgaggatgcctttactggggctgggataacttagggccctggaagtagacatgttgctgacctgagctctctggtataaagactaacagaaactataggccataagataccctgtgtaaaagtgagttggtggtctgcctcactgctaatgattttgcttttgccatttatattcaacatgtaaggtaggaaaaaatgaggtgtacagccttgactgagtagctgccaggtagctttcttcagaacacaatcattctgagagcctatcatggaccagtttccactcttgtcaactgggcgaaatatactaaaatttaggggtggtgttccaaattcaaattcaaaaaagtttaatatatgtacgctaaaaataccatttgaaaaatattatatgcctagtgaagaaatttctcagattcccaaatgccaaactaagtggtgtgaacatagtgatatgatgcgcgagcgtcaagttgagccctccagtctcccctcttttttctcttggtataatctcaagaaatcagattctagtgaaggaatctcctcagacattcccataagatctgttttaatatcaacctcatgatcaagaattgggttctttttaccaccctcacaattaattatgttaatgtttcatgccttaaaattagtctttataggagtccttagacaatcaataataatgatgataatgaagattaatcagactacatatgcagttcttaaaatgtcaaatacttttaacttatcactagttttaaactcattttaagttcattttatcctctgcagaaacctttgagttcattattttgcctgttcctgacttggtaactttggaaacttgcatgtgtctttgaagtaaattaggttgccatattaaagcttcctctctgatttctccccagctggttagggaagaggacatcgagttaaactgtggttcttacagtgggagaatgttggtatctatgaatggttgctaccactttgctgttgagactatttaatcttcttttcacagggccaagacctagggtaaggcaagctagctgcctggggtgcaagatgtaagaaagcacacacttgtcaagccattctgtttacatttcatgccctagttgcttgttcacctcattctagtcccaccctgatctttaaaaaaagttttactcctggttgtctgccctgtctggtttccccaaccactaccctgcccataccgccccacccctgccacccacccattatgataacttcttgaggaagtttgcaatatacagtgatacgtcacaggtatgctggcatttggacctgaagggaggtgctggaagcattttgattgttttcagtttgatattttagcctagtgcattttgctgttaatatctttctgccgttgaagtgaagaagtccaggattctagattcattcttcttttttgacaaacacaaatggctttttaaggtgcatgtacccatgtatgcatgtatgtgtgtttgtacgtatttatatgtgtaaaggtgtaccaaatctccatactgttaaatagctatgcatattccgtgtatgctaaggagggcaacaaaattttgtgtaatcccctcttgacttgagcccagcagaggtttaaagggctgttctgaaataaaattttcattactctcaattacagactcaatctttacagacatatccatagaaatgtcagtgacatgcataagataacccagacatagctaaaaattggtccctgtaaaaatacagtttagaatttagtatacaattttgaaaagtaaagaagcagatcttctgtacttaccacatttaaagtataaaataattaaccttgaactttaaccaaatagccagcacaaatcttttttcaggtttagataatctccttgtcagggattcattgaagcccttgacaagccttccttgtagttaggcttttatccatttcagttttcttgattaggttatcttgagtcattagggggtttatttattttaatagacacttattggattcatgaaaagagaattcggtgacgaagaaacaagagctgaatattatctggctcatttcacacttcagaagagtctcaaccatctgaagagaaatcctttcacagttacaaaagtttgtttggggactttatgtgcttccatttagaaagcgaactgtctgtggttaataatatgagtttccttttgagatactcagaaaacatttccctttggttacatatgctgacattttctgtattgaagatgtgggtgagtaaatggccttttgcatttctgctgcaagaatctatgagtcattctcctgaagaactgttcatttgctgagatattcattcattagagttcctagaggggcaaagggagtgggggctacttactaattagtaggtgaagtaactcattagctttgtgttagtcatatcaaggggaataatcactgtgacaaggccctgccttcaaggagcatatacagctttattcaacaggggtaaagttattaactcttgtgggagatcagagcaggctatgaacttgtgtttagtgctgagcaagttctagtttgtatttgttctgaaatattgtaaaaactggaaaattagtcataaacctagaccaatgttttttaaggaaaaaacatgggggctgtgagaagttggggtcaaaaccaagtgtcctggggaagagaaagcaagccactttgtatgcagtggcatttcagtaccatggacaggaaccccactcttttcatctgtggtgtgcccctcccctccttatcacttaacatgtaagatttacagccaagattcaaactcttatctgttaggctccaagcttgaacactgggccatattattgttttgtgaaaggcctccctggtcatttgaacattctcagcctttggtatgtggtttggaggatatgtcactcatttattgtggacttgaaatattttaatcttttaaaatattttataagtgaaatagatattgccatacctcattcattttcaattgaagagagctttaaaaactctaatattaacaacagcaacgacagaaatacatgcatatatacacacagagagagaaaagaaagtggttaaaatgataacagattatttaaatgattgatgtagtgtggttctttatgatatatgtcatgtctttttagaatgaacactcctagagggtagaacttatgaagtgtgcactttaccagtaccaggccattgtgggtcccagttaataccaagccacacaagttcactatgaaaaaagatatctagtctaggataagtcatgctcttgactttatgatagccttttccccaacaacttcttcttaaaaaggaagaaggtgggggaaagagatgaaaagaaagacgagttaattcttcatcatgtcagttaaaaagccctcaaagactcctagggcccataagattaagataaaaattgtttttttgcatgacattctttataatctgagccctaccttcatttctagactttcagtcctctccccacctggtgaaatctatctttatcttccaagattcaccttgcatgccataatctcaatgatgacacttttcctgaactgcttcatggtcagaattactcactttcttgttggcagtctcaattaacctttcaagtaaaaagtaacaatgacaattagataatatatgtaatgtactagcccattcattgcatggcatgcaggagatgggtgctcaacagaaaattgttaacagaatcaatgtcctgagagactactattactatttgcaatttatataatggaccattttccctatcgtattcatgcattagagatagggaaacaaaccttagaacagtgacaaagttgcttctgagaattggtgcttctctcaaacaataactttctgaatttgagtccataaaacattcctctaggctaatttctgtgtactctaataattttggttcaatctaatgactatttattgagaagctactatgtgcaagaaaccatactctgctctgaaaatggtaaaatgagtaagaaacaaacccttgccctccactcccatcaagaagctaactgttctgatgggaatgcagacatacccacccctaaaaataataatgatcaagttgtgaaaaagtataaacaaaatgcttcagggttatgcaagagtgagaaacaaatgagaccacatcagctgagccttgaagtacagcttctcatggggaaaagaagttgagtatgagacattccatctaagagagtaacatggcagaagcatgaaggtgagagtgtacctgtgagtaattcacagtggctggagcacaaggtcagtaggggaactggtgggagacaaggtcatgaaagaaaaatggaggcaaatggtgtttttttattgttgcctctagtaatgttcttaaattgtgaactagaggttctctcctttatgcaactcattaatgaaactatcaacttaataaaagataaactaggaattttttattcatcttccagaaagaattaatggcacatttcttcaaatagtaagcatgtctaatacatttacaatgtgatttgctttgtaaatgtaaattgatatgcaacttttcaggaacacttggattgtaaacaaactatatcttgactggtaggagtgtcatctcacctgcatagttggaagggcagtcagagttgttttttctactgagggaaatatatttgtttaagaggctgatgagatggctaaaatgagatgtgaataaatattatttgcttatgcaccctaatgcttgggaacttttaaccattgattgcaaggaagcagtctttgaacttattaatagattccttctctggattcagattttgaaggtaaagttttaattgcgaacctgttggtattattacacttaggctccatgtatatttttctctataagttccaggaatttcctgtatctaaaaaaaactttttattttgaactaattttagactcacaaaaatgttgccaaactagtatggaagggatcattgcactgtattatatatccctcccctatcttcccctaatgttgacaccttatatcaccatatggcaattattgatgatagggcaattatcaaaaccaggaaagtgacattgtttctatactgttaactaaacaaaaaccttattctaatttcacctgtttttctactaatgtctattttctgggacaggatcgtagccggcaaccacattgcatttagttattattattctccttagtcttctgcagtctgtgacggttcttaagtcttttcttttcttctattaccttgccatttttggttattttgttgaacacttctcagtttgggtttgtttgatattttctcatgtttcgactgaggttatgcattttgggcaagactacctcagacatgatgttgtaacctttgcagtacattatatcagagcattcgtggtgtcagtatatcatcactagttatttgaccttgaccactttgtcaaggttattttttatttgtgcctttaaccctgatggtttatcactatctgctttttctgacagataacaaggtaacagatcatggaatgtagaaccaaagaggaacttagagaccatcttttgttaacccgtccttttacagttaagcacccaggagcttgaacagtgtaactatttgcccaaaggtcaccccgttatttaatgacagaccaggaacttagcagttaggtcttagagatccaggtttgataccttctacattcctagctatgctcaaacagttataattcactcagtcctagttttaccagactgtaaaagctaaatggactctaggaatatacagccaacctttggtcaaaacttaaaaccaggctaagagagaaatcccagggaagcatatactccacagttcatggtgcccactcacagagctgtccaaggctggaaaccagatgaacttctgtatcagcatttctgaaatgaaaataattctcatggaatgctccacataacacagagaaaacaacaaaaacctacttgagatttttaacagaaaaaggagatttgtttattaataattcatgagttcccattgaacatgcacgacagaaacagtgctattcaatagagaatactgtcatctgtcactgttttatttgacatttacacttttttttttttgcctgatactgcaaaactttcttggatggcatgcaaagattatataaatgaaaaaaaatcccaatatggggaccctttatctcttctgtgatggggtcactcacaattacatacatgtgtgttcatgcaactgcgtggcactttctcacacattcattagccagcaaacaagctaataagagaccgtattgagaaaacagagataagcatcccaaatgggctggtgaaaagatgatatgaataaaatgatggtgcatgagatgggaagtgaggtggaagaatagatttcctgaagataggcttacaaatacatggaatgagcaagcgagccagagtgaggggaaggtaaatcatggctgccatgaggaaaactaacacaaaaatacattaccagttcagatacaaaataaatacctatatatggcatcacaggagcgcccgtaggagggaataacggcctttaggagaagagcaaggtagagttaggatcaccttccgattttgtgctactataaggctcttgacaatctttctgctctgtaggttattatttataaaaatcacagaaccagctgatacattcataagctaattactgaggcagctgggtacacatggtgcaatatgtccaaggctgtgaagtatcacagatttcttggggcctgctgtggtgggggtgcgctgttgaaggctccatcccttaatctgatcagccaagcaaacactttgtggggaaactagattaataaccctctaaataccatgaatgtgcttcatcttcaaaaccgggttcccttaaacatgctattagctcagctccatcagggatttgaggaagttctctggtgccttaagaacagggtcttgttggctacctccctgtgccagaaattaatttggtttgcttatgtctgcacacatgatcacacttgtgtctaatctgctccctaatagcttcaaggtcaagaccttgcatgtcagtgggcaaattgagcactacacttcttaaagactgatggcagacagcacacagtccataatgaggcctgtagtgttgttctaagtgattgtaatgagtgcagattataacagcgcatataaatcaaatgcggcaatgaatgttgtgcgagacattcccagtgtcataagtggagataccactcagctgtcacctgtcttctttcaagctgcggcttcccacaatgcagttcagtcctcaagcagaacagcaggtgctgtcttccttaaggtctgggtatctcagatcttcttcttttaacagatgcaggtttttgtttgtattttccattaaatggttagtctccatgctcttgcctcccctgggagatgttaaacatacctgtttgaaacatttgaaagaattcagttggagacttattcagatctatgaaaagatagagaagtaggagcttatttttccacagatggtttattttccatttcaagaattcttttactttatgcaaagaaacccttgaggaaacacttggggactagatttttaaaactataatttattttctggtatggataaaaaaaattgtcttcattttttatatacattgcaccttgaaaatcaaccatgacctgcctttcaattgagttgaaaaaaaatctatgaaaatacttggaaaaagatttccaagcaaatgataagataccttgttttcattcttcctaaccttctaactctcccaagcttccagtttattgcaagaaaagatcaggtctgcgcaaatgtggcctctcacttgtaaaaacaaggcagtgttgtgttacagattagtttataaatccctggtggcttcacagttcagtgcctacagctgctgcagatgggcctgggtttttgtctcttcgcggtgctgcagccggcagttgaaggagaaaatggaatgatcaggttattaacatggaggccgcgaggaagaggctgcacaatgagaacagctggtgttgctgtcttggctgatgcagcagagataatcaaatcttgccttttttggggtaaaggcagaagacacagtggagagttagacaaacaatggcttatgatattatatggggtttttataatgcgtgtcaggaactttcattggcttacaagtgatgatatagaatttgttgaggtttgggaattatttttcacaaagtcattcgtgtttatgcacctcttaagaacatttttttactcttttgcaagagacatgatgtgggacagttcttgtttttaaaattagtgatgtagcttagaaatgatgggttagaaagctactggtaaaatattttgacatgagtcagtgagcgatgttgacagcatcctctgtattattttcatataatccatcattatttgcattacattttctttctcatgcagttgcaagagagagaacatccggatgccagattttggaagcagacatttgcaggtgtgacctgaccaactgcctaccttcctgcaggtgtggctgttgcgggaaggtgatggttaagagggcctagagcccgaggtattcagagattgagcaaatatacatttcttttcattctagccaaggttgttgcttctattttgtggagttattgataattttaagaatatttcctccctagagaattcagtgttgtttacacctagacaatttttcttttttagaatttgctgtcctgttatgcatatttgtttatcttcactcttagcatgaaatgctgcccagttgggtaattttaaaaaattgtagctgactgacacaaattactttttctgagaacagatgactataatcttgctaatcttttacagagaaactgcaattgagaatatattctataggcagggtgatacgatatctaacaagaggaaagattcttgggcattggtataaccacctatgtggtcaggggttggtttttagagtcagactgtttcactatctccccacgttggcaggaacaattttgacagaaaaagatgtactgtgatggcactggaccgcagtcaaggccccctcagctcctctacactctgcaggttaatgcaagcgacctcctctctctacagggctggctgtgtgaactgctccgctggaaggagaacccaagcccagaaaaccgcaccctctgggaaaacctctgtaccatccgtcgcttcctgaaccttccccagcatgagagggatgtcatctatgaggaggagtcaaggcatcaccacagcgaacgcatgcaacacgtggtccagcttccccctgagccggtgcaggtcagtgtccccgaccgccgtaccccacctgatcagggctctgtgtgccagcagtagctgctgagggtccaagtggcacacaccacaccaacttctgtcagagggtgtctcatgccaggtccccaagtacagaagacgctgtcgtcacagtgggtactgtgtgtatgtgtatgtgtgtgtgtgtgcatgtgcgtgcgtgtgtgtgtgtgtatgcacacacaaagaaaaatgactgagaagttgaatgccaaagacagctgctttcctgagatcattttacttgtgggattgtaaagccagagcgctcacggagaattaaatctctcgatcggaaaacatggtttccatcagttcattttctataaaaaacctgtgaagtagttttgcatccaaaatccctcaaagaatgtttgattagactgaggaaaagaaatagccacatgacctagggaataccattgaactcagctgaaccttgagagacagattgtgacagattcttagaattttaagatgagtttttgctgtctttggttacatctcatttagaaatctgccttcctttggattgcgtgttttgttggcttagtttttgctctcattgagagaaataatattgctttgccatagtaattgagtttaactactgacactttccatagtctaaaattaattgcttttaagaagaaatattagttgaggtttccaacgttagaccccctagagtttggcccacaaattgttttggtaggttataagatgggcctgctgcccaatactctcaatttcagctgccaccaaagaggaccctttggcctgtctctgaatctcctggagtaagaaaaagaaagttgaggcaggagtgcatatgtgcacatgtgtgtgcagaatggaagaggagaatataaagggagagtgaggcacagtttcttgataaaaatagagaggagtggtgagggatgcagtgaaacaccccaacctgaggtttctgtctcctttcccttccctcccccctcacatgtttgggagagaagccagaagttaacacatctttatgtcacttttcatctaaatatcattatctctgccagtgcttttgtgctatgcttttgtgttatcattggtcagtttccagggccaaagtcgcagagtgaattgcccaaacttaatagtttggcaattaggcttatgaatttgtagaggcagtctcttgcaatatccacagtgatcccagagttggggatgggggtgatgagggtacacagcacatactcacccttcaggacccatcctcccctttcccttcttggtgcttttctgaccgaagtctcatccaccaccagggcaccttcttttagataattaaacccgtgtactcagccacacagagcagtggctttcagacttggagatttaattgaaattaaaattaaagaggggcccaatgtaggctttccaaccttttattttagaaaataaatttatttgaaaagttttagggaagctcctatttattgtcaatatcatttcataacatactctttgatatcagacagattaatgaaatggatagcctcagacaaaagatcatgtaaatgctacagttcagccatatgaaaatctatcactcccccggcatctccactgcttttttttttctcattttgatgtgaactggattagacttctatcttgaaccaacacaaggccaaggacttgcttcagggaaccactgacttttcatggaatttttattcagggcctatcttagttcagtacaaatgaagtagaaataaaacagcaaggaaaaagcaatttattccacatattaatcacagcttattttaatcataagatggtgataaagttggaaacttagagaaatttgagataaatgtaataaaatgcattgtttgttataattgagggcctcccttcatctggatggcagctcttataccatgcctgtctgttttttgtccattaattatcatctcgttgggccctgtatttaggtagctaaaaatatattcaacataatattttgtcttatagttggccagtttgagtacagtaaatcttagaagcagacagccaattgatttatgagttttattatcttttctattagtatgtcagaactagagtatgctgacaatatttaatggctaagcatgaatctgtaatttttcttttcagttttaagcatcttgtggctatcaacattaacttctgatatcactaagagaaatgcacttattttataaaagtttatttccatcactcagaccttagctaaagagtttacaaattaggtaattttctctaaagtgaatttgcctcagctgttgaccttgagcccataactactgtgaaactcatcagcacgtcacatttctttaacgttatgcctatatctgagtgacactgctttgcaacgttgaatttatgtctgtcagcaaaatacaaagctgtggattgtttattacagtcataatatgaaaagtgaagaaaaataactgacactagacagcagaactcctgagactaaatttggcacagcctctgtgacttggggagggctgtatttaaaaacataccaagctactataaaaaggtctgtaattgtccaaaagccaaggactcggggttggaattcacttgggcctttcatatcaactaaatttttagcaagatacagttaattacctgttttagaaatcttaaaaattcatatgtagggtaatattagtttggtgatgttacatttttgtctaattagataggaaatgtgccattattaaattgttaactatgggtaaaatcagtgattattaagagcttatatatgcagcatattaaaaaacacgtaagtcctcttcacttgtggtcatggaagcatgccatttaaatttctttaggtaattagggtacactatttccaaatttttcatatatggtaaagatatgaggcagtgatttctgtgcataattacccaccagattaatctgttgtattagggtacatagatgtactggaataaaaagagggagctttgcatcactccttctccatttggtgctttctgtgatattgagaagtcccttggagtcacagcctctcttcttaagaagagaggaactttttcttgctgtttgtgtgcaaatggagttgacaaatggatagttttttattgtctgcagatgtgtttctgttaagcccacaaaaggtttagacattttaagcccttgttttttaacttttaagttcaggggtacatgtacaggttcattacataggtaaacttgtatcatgggggcctgttgtacagatatttcatcacccaggcattaagcctagtacccattagttattttttcggaccctccccctcctcccaccttttacccccctatcggcccctcaagtccacatttaaaaattagaagatatcacataaaatctagaaagtcagaagatgtgatccaagctcagagttttatgtggctggagccaatgtcctttctgcagggcacacacttactgtcctgctgccctggtccctgtctcccctcctctgagtgtacatgcatatatagctgtcatgtgatttcttgaggcatctctcctgtcaggtcacctgaccacctcatcaaagccacaagtgcctttgccccatggctccaatttctttgatggtagctattacatgccatttatttttatattaatttattataattttataatcccaacaaaattttttgcatgcttaagtgcatgtttgatggcatttctcttcagagatgaagcaagattatagctgagaccacgctgggcctgaaccattgagggacattgtcagccccagagactcaccagccctgggagaatgagacggttcttccttgggaatttggatttctccaggtgttgtgtagctttgatgtcatattgaattatctggtttatccaggtttctctttagtattctcagtctcttcagaaaccccgatttaagctcctgcttttggaagctagttcttcaggatctgaacacacttcgtaagctagatcctgtcacatcatgaatccacagttggaccagcattgccccagggtggtgagaattggttcctggggagcataaatatcttagattcacagtggtttgtggccctccaagggaacttggtacataaagagataatatctctctggtattaaaatttcataaagaggggccatgattagacaaaaatgccccaaaaaccttctgaggggatcagtagtgaaacacaagttgagaaatactaatctacataatgtttctagtctgtgtgtagatagcacagaggagagaccttgtaaggcaaaccaaaccaaagcatttcatgaaaaagaggaaataaattccatttttcaccccgaaaggttggaaacaaaagtatttcctgtggttgtagtgatttttctcccaatagttattataacccaaggccctgtgctgaatagatattctcagcttagaataaaacactggttaggttaggttcattactaccaactccgttttacaattggaaaaactggaagagagacgtcaagccttgcctgaagccagggttgccagcggaatgaaaacacaggcgattttggcatccagtctttcctctgaccacacttccctcatgcaggagagaagaaaggacattgctcatgctatgactaggtcattgagtgagggtgattagggagcacttgccaaattgttcctctctgtgtcatttgtgctttattgtatttccaccacactgtttccatgggttattttgtaagttcaggaattctgagcttgctgctgtgtggtttcctgacaagtacttgttttaaaattccatgccgtacattgaataagaatgtgagactcggttagtgacagtcagacaccagcattgtcccttgacttgtctgggttgcttctcaggcgattttcaacattttctaagccacagactccctgtcattggtagcaaccaatgattctcaaccaggggagattttgcttccatgggatattttggcaatatctggagtcatttttggttattataatttgggggtgctactggcatctagtggatagaggtcagagatgctgccaaatatcccaccatgcacagggcaaccccccaaaacaaagacttatgtgatctacaatgccaagaatgaaagcttgtgccagtaattgcctaacagtgaaagataaaaaatcattagtatctctgagactgattctgagttttgtctgttaaaaaacccagtaataataatggtgacactgctgctgcttctccttcatcttccttcttcctccgcccctgcctcctccttttccttcttctctggcagtaagtagcctttttgagagccaggctttcaaaatgtgagattttcacatgtcttatcttcttcagttattgtgaacaaccaaaggggtggttggtttttatctattaatactttcacagatgagaaattgaagcttaaagaagttaaagtaactcgctcaaagtgagaacttaaattcacatctgtctaccttcagagtctgacttttatcatgtgctggaaagcactgctaacgtgcgacagccagcattccctgaatacttactattagctgtctgctgtgatgcagagctgtttatgagatcttcatttttaaccattcactgagcagatctagttctgggagttttcttatttacagaacacctaatgcactgaaacccacaaatcattggtgtgatgtcaaagaactgatgtgactgaaatttttacttttcatagctgctttggcatttttgaggtggcttcagaatgtgcctcttatcgctaatgttcaagtgcacttcagatttacctctcagccctgggaatctgaccctgattttctactccagctgcacagactgtatcttgatttgtgaacttgcttcctgaaggacatcttccagggaaacaaataaactaattaatccattaagaatgtttacaaattctcttaccgggttactagaatttttctttcaccttggattcattccaagctcctattcaaagcctactgtgtgaatgtggctccagagttttgaatccccactctagtcctgaggagagatgcaaatgaacacttgcatttgtaataaaatattgtagcagttgggtagaagtaggtcctcacttgggaagatgttgggagttcctgactgtcagtgaggctgcactagcatttttcatgttgatattatgttgttctgtatgtatttattcaacttgaagagcatccttggtttattatattactaggttttcaacatgtcaaaaattttaaatttgtcattcaggaatataaagagatttgaaagtcatttgttatcaattctttttactctaagagacagttattttcatcttgggtttatcttccaaagtgtactgaacaggtttcctttagtgataatcacaaagctgaagaagttcattacagtcagtagattagacattagctatggctttgttttacctagagatttttaaaaactctaagacactgtacaatttaaaaagtaggcaggcaaagtaggccaaagaaatgtgcagtttcttaaagttgttaaattattttcttttacaagacaaattccagcttaataattggagatgtattaaaagaaattgaggatgctagaacttcatgaaaatccaggtgtaggactcttgagtatggttaggtttctctgaatctggaactgggaattcagcagctgccatttatggattcaccttctcctttgccatcctgaacatagtattacctctttctcatgtcaacttctttccactacaagctttacttccaagcatcatctgatttaccatcttctgtgtatctctgtctaccttgtaacttctgcatactactcatagtgtctctgcattataattctgcctcctccacaccttggcctgcccacggttcgtgctctacctcatgactttttaccatgcctttgtcaaactcactttctcttgcatactccatatttactactttaagttcatctaagagggaaattgactggttaaccttatcctcctgaaggctgactttcttggcattcaatttccaatcagtcatctgaatgcctaatttggaaggcattgcattttgaagaaagagctttgttgggcaaaatattagaataacctcaagaagattgggaaatagaaagccacctggccatagatcacttgtaggtaacctgtgaatgagctgtctttgggctggaaagttagggccttttagtggaacatggcttctagtaccctgcagttaccagggtagaagaatacaggtatgattaacaagtctagaacaaacctttcattatcaagagagattcatatgacttcttttttaatgtaaagtgctgtgggcatgcaagtagtaggaaaccaatgcctaagggagattttcagttccatgtgtgtccagagtattctacctttttattctattgcagcttttctaacatttatcatgtagtcacatatgtttagtgactttcctgtagaagctgataaatattaaacataaatttttatagtattctcttctggttctgctaatgtatttttttaaagtcagttcaacattttactaggcttatcattttaattactgaagttagcttttcattcatcatggggtggttctaatatttttgccaagcagaactcctcctatgagtgactggacctccataacacaccgccttccaaattcaacattcagggttagttgctggttggaagtgaaatgtcaaacagctgggttccacttcgctcagtcttttcctgccttctgggaacatagagaaccctggtttcttgagtagcttgttcttccattattgctatgtttctttaaataatagtctaatttttatattctgcatttttgaagggcaatgaaattcctgcaccttactctcttggtttttagatcctaaaattgagtagaaggcactttgtccaatgctccctataggtaaatggaatcacagtcagttgtgtcatttatatcggtacaaaaagtcttcatggatacaagcccggtgctcagaaaccactaaaattgctaatatatattgtctttctattttaatagaatattgagatttttaaagttttttaaaagttttgggatagcaaagtactccttagacatgttttcatagttttttccttctggtgagagtaaatgaagccaggtataatattaaacctttagtgccttgactttttttttttttttgacattttggtaggaaaataaaactaaacagaatgcttttgaacataaagcttcattggctttcttttttaatattgctttggaatttgttaggtgctggttttgctgttgtcctattggtcaactcaatgttgctatttatccccttctccttccccttccgcttccttccttctccctccctccctgcctccctccctccttccctctctccttttacttacttaaaaataaaatatgaaacactctttacacctaaaagaaggcagtgactagtacattttgtgaaagggcaaactgattaaattgagcagcatagagcaatgagaaagacagaggcaaaataaatagagactacggtagaaagtgcattaaaatgcatccttctttcccttcccacccacaaaaaacaacaacaataaatctaaactaaaattgaggtacttgtagatattgatgtgtcattgttctagtcaagtgccttgtcacatttcatctgtgagagggcaaaccacattcctttatacttgtatagatagctagcaaagtctggcttttggaaaaaaatgattaaatttcatcgataagcctgctgttaggcttcaagttatagacctgattgagaagatgggccatttttattctcgcgtttttacttattcattcaacaaatatttgtggagtttcttgaatatgccaagtgttattccaggcaccacatatataacagtgaaaaaaaacaaaatttcacatgtacattgagcagttttctcctttattcagaatgtatttttaaatagacctccattttccctctggctaccttgcattattctaaaattcagactgtaaattagtggaatccataggttctatttcttcctctgttcctgaccctgggtgacatctttctgcttctgtttttctagctgtttctagaatggacaggtaatatctctgaaacacgttaagcctctcagtgatgagattaccttaaaagaacaaagtgtggctatttgaaggtatcaaaccaaacagaccttctgaatctattctatagagtctaaagtgatttacatagctctacaaagaatggcatctgttgattaatgatcaagtggcattttaaaaaatagttttgatggaaaacagatagataataagtgtgtccactccaaccctaatttctccctgaccacacagataaacacttctctttttatgtcctgctcatatttattctctccagccagaatgacttctccaagttagcaaccttatttacttggtactgaggtatgggctaattcatcgttagtacatgaaccaaaccacctggctcatttggtgtgcctttaataaagctgtggtccttggaaggttaggtgtgtgaactagtccctcttaataatgagctcttatggcagaaagtcacatgctgttctaggaagatgggagccttcttcacattttctgtttcaattttctaccagagtgcttctcattgataattgttgatttcaaagatagtcatcgtcattgcagaagaaacagaaaagaacatctgcagaaaagggcttccccacctgggtagatgaaattctcattatttcactctgtttggtcagtgcacttgtttcacatactttgatttgggcccaatcactcacacaaggtcataaatctaggaggtaattaacagttgaaataggggatgaaggtagcttaagaagctcaatcccagttgcgtttctgagaatacaagcctacctgctggggatctggacttaacaaactcgatctacaaatacatactaatacagtcattgttaaagcattttggactgtcttacttaaaaaatatttcagtacaatgtaaaacgtccaaatggaaatataatttattttaacctccatttcttcttttttaaaaaatacttaagtagtataagttgtcaaagagcttatacaagtagactgaaacattatctctgctggaagcatggcgaggtgtttggatagagaggaaaggccactggaccttcagaagatctgggtttgaattctaggaccatcactggaattggagctctgacgttgtagaggctgcttaaaatttctgaaactagtttgcgagaataatcccaaattgatggggttatttgaagtttatatgagatggtgattgcatagaaggcacctgagaaatgttagtagcttctgagcgttattagtattaatcttaaggataaaggggataattcttactgaaaagagcacagaattgaatcaaggatggtgtcagcatagaattttatattcagcaagataacgggagcatgcctggcctctattgtttgcatgtagtacagttgttttaagacagatttagagactcagctgtctggtttcatatggccttcctacattttaagctttttttaaaagttattataacttatttaaaagataagtgagaacttttcttctcagctgtgaatgaaatccttctgtagagcataataaaatgccattgggtatgacaaaagttggttagtgctttgtttttttttttttaagcttaaaaagcaaaaaggctacttcagcctctgtatcatctctgagacttctgctgtccttgctacccattagcatccacaaagttgtgaaagaaccatgtagtgatgatgcttgagactctttggtgcagtattaaataggcatctcccccattagcagatctgtgctggccttggtggactcaaacaagggaaaataaatattctctggtgttgagttcctcagagactaccaggaagatgaattcaggctaccagaagatgaattaggatatgaagtgacaagtagagtgaagatgcagaacttgctgtgatcccaggactcccttcagtggaacctctgtgctgagaatactaatggcctattttcacatgtatgactcttccgggaatgaccacctggaattctacctctttccctcccatgtatgcaggtaaacaggagtggacttacatacactagtgtcattgtagaaggaatataggatgagctctaatttactcaaaccaaacaaaaacaaaaaagtaaaacatttgcaaattttactattttaactattgatggcaacaaattatttgaagtgtagttcacaacaaatacgtaacaagtcatggctttataaatgaaagccacagggcaatgtatataaccatttaattttaattttaaaaaatcgtatctttcttatataatagaaacaaacacaaatgcttcctttgaaattagagttttctgattataaactttgaagtgcatttaaaatagatgactgggatttaagtctaagtgtagtatggctttaaggttaaaaagtttccaaatatttaaaatttttctatatgattattgcccccacactgaggatttctgggtgttgtttcagaggccagagcatcttataaagaataaatattactctctatttctagtttcaatgaacctttgacccaataagagaaaagatgacatggtaaagaaaagggcactgtaagtgacatagagtctagtcctagggctgagtgtgtgaccttggatgaggcatttcactctgaatttccatctactgttttgttttcttttgtttgttagtttgtttgagacagggtcttactctggttgctcaggctggagtgaagtggcacaatcatggctcatagcagcctttacctcctgggctcaggggattctctcttcttctacctcagcctccaaggtagctgggactacaggagcacactaccatccctagctaatttcttgtatttttagtagagatgtggtttcaccatgttgcccaggctagtctcgaactcctggactcaagcagtctacctgcctcggcctcccaaagtgctgggattacaggtgtgagccactgcgcctggactccatctactgttttctaaattattacaacatgaattaggtgattgcagagaccccttttatctaaaacactcatactgtgagttggctcatccatttctaatttccatttgagtattttaatgagggtgcaaaatataaacaacaacaacaaaacaaaacaaaaacacattgctcctgggaggttcaaatgcattttggaaaaacaaattagcaacactataacagattatgaacatcttatattggactcagagacccagttgattttcttatgactgatagttttggcaattgcaagagaaagccagccactgagttttaaactgtcgtaaccaaacctacctactgtggcttctcagctgtttctgtttagtgtggaaatctaatgtagctgcaaactactgctgatttttattaagttgaagtctggaacttccccttgtaatgatagaaaagcacactttcaattaaaggaaaactgccaaagttctgaaattcatttattttattattacttggtttgaccctagaaatgggagatcaagcaaactagataggtttgacagttctaaggtcacaagttcaatttcctcacaagttgtttccagatcaaattcactgcaaatcatataacccttcaccttttgatatagaatattttatggaattgtggatcacattggggtcatcctaataatcactttggggctgggaaaatgacaggtaagtcaggccaggcaaagggattcagtgagcaagtctgggaagcagtatgtggcttgtcagaggaggaacatggtcttgcttctctatagtagagtcagagtatgctggagaaagcctactctggcttgcagaagccaattgttaaatttttagaatttcaaaagctggttgttataccattggcagcgtgaaactggccatggtgggattattcacactacaaaaactggtggattatccaattggggctttttttttttctttagagacccagttgttaaatatttgccagcgaaacactgagtagactccagttaacttttttatttcaagctctttggccatccgtgtattatttattttttataaacaaaacttgctgaaaacaattgtatgaaagaaaagtcaggtgtttccagaactgattgtctgattggtaatacagctcatttgatcatccagataacaaaaatgtttatttaaatagcagttgttcctactctttccttgtcatgcttttctttagtttaaatttatttcttcatgttcaaacatgtttatctttgtatttctttcttatgcagcgtacaaagctcacttgagtatctggttggatcaactttatagaatctgtagcataatgagtccataatttgtgatttcctagtgccaaacacccaagatatttgaggagtctaggtagaaaacaggaacaaattaacagttattttttagatatgataaactcaaacagtgcacctcaaaaattaagagtcaatttttttaaaaaaagtaaattagggagctaaaatctatgatgtgaactcttaaagatgaatatatgtgaatatggaaaggtattcctgtttctgttatgatcaaaatgagcagaaggtgctaaagtgagcatgtactgcataagtgcagtattcacatgcaatgattttttttaagtatagtgttttgcatttcatgtttttttgacaatgcaggtcaatagttgtactcaaaagtgtggtaagagaagactggcaaggaattgtggtgggccaatgtcaaatatttccatgtggtgtaatttagggctacacttttgagaggaactcttatttgggtgcatcatgggaaatgaaagcctcccaaggagacaggggctaaaatagttaaacagcatgcctagtaagttaacatagtaatgaaaggaaagaaccaaattaactgattctttggttgtataacataacctggatcaaatgcatcaggatggtctgtcagttgacaattcttcaatagatcttcatattagaactactgatttaccaggagagaagaaattttcttgtcattttgttgaaaagaaatcaaccagtttgagttcctaatacagatgtagtagaggtggcatgctgtactttgatgatctctatatatttgtatatatgaagcagagtagtactttataccatatgaacatgtaactgtcatctgtgttctgtgttgccattcctcacatatagaacgtgtatgtaatcagtttctatttcatgtcatattcatctacatttgcagcatttcaaagattagtcggaaacatcttggcagaaatgggaaatgcagagttacttataaattccagaactacaaagacacagatcaaacatatgatattaataactagttgggggggagcattaaaaattagattatttagaaagttgaaagtatttgtgatcatttttctcttcttgaaaggaaatagatgctgagttttgtgttttgttttgttttttttctcccaccctcacatttcctttctccccctttttcatgttttgaattaaaagctaaagacaggctgaaagggtgtatatataactgcaagaaggatgtggtaaatcatggcagtggtttgtgatctcacagacatggtggtgtcagagactgaataccaaaagcgaatcctcagcttccaatggatttacttgaaatccttcacccttgtagcatatcatgggtaatagcatatcatggataattacatttttacaaacggtagagaaaatcattttgacacacacatagtattttccagccagaccagcttttcaatcttttatagctttcatgcattaaggctcatattttctttgtttatttaaaaaatattattaataataggtttgttctgtggtcaacttctgaatagaaaatactaagaaagacccctttttttcctgttgcccccaagtcaaacattcgataccttttcctttgtagaagtttgggctactcgagtttttgattaaggaaagttatgacaaccaaattttcatggagatttttaagagctttggtcatttttcagcttattgctatgtataatggaatgaattatgtttggtggcaaatcactagaaaaaaagaaaacaggagaaaaactcacaggagaaatactgtcattgatttctttgctaccatactactgtccaataaagtgaattctggctgcatgaacctagaaaaggctgttcccactagccattcacctgcatcaaaattccagggaacagaaaaaaattaggggacaatattctcttttcttaaccctttctgatcaaatgtggtatttcattttgaaaatgagattaattcccctaaggcttttgaaactttaataatacacaataaataaaatcatatctaataataactcaacagtttcatttggcaccatcatctagatgtactgcaactgcggaaacataaatacttgcaggcttcaaaagccccatttctatttgctaaataaacttggctggcttaaaattcctctgtgtaccatcattaatacaatctactttgacagcatttaattaaagtgctttttctctattaaattcattaaaagttctcccccactccccaatgtataactgctttccagatgctgagtggcaaggacctataagcctcactttaaataacttctcatttctctttataaagtgtttattacattcaatttagaaactgttaaatatggcttagaaaggaagtcagattccaagacatgttctctatccctttagccatctctttaaaaacaaatgttagtttaactcatctgaataagcatttattatctgcatatttttcttatactctgtcaacactactagacatttaaactgggaggtaataaagatatgatttccacatcagggttggggaatttgcattagttctaagcaggtacatggcttgaatacatttgcctgcccagattcggggagagtaagcatagcagtctagtattaataggttattgacagtttaatgtcttggcacctacttagcccatgcagtataataaccaggaagctgtctgatatgaaagccatcaatagcattttcaatcaaaacctttcagttaattgctggttgaccttagagatttcctttaggcaatagcattcttagtttagaccaaaaggaccatattgatttgtagagtttattcagagatgattatttaatacccattgctccactatgtgtggtaaattttgccttttctctttctgccctatgaagtgttttttttttagcattgcttttcacaaatattctttttaccagctctactttcaaaatatctcattaaatctgttctcttctcagaaatagaaagtttggaatcttgagggtacccttaatcaagtggtttttgtttgtttgtttttgtttttatttttatttattttttttttgagacagagtcttgctgtgtcccccaggctggagtgcagtggcgtgatcttggctcattgcaacctccgcctcccagtttaagcgattctcctgcctcagcctccctagtagctgggatttaggtgtgtgccaccatgcctggctaatttttgtatttttagtggtgactaggtttcgccacgctggccaggctggtctcaaactcctgacctcaggtgatccacccgcctcggcctcccaaagtgctgggattacagatgtgagctactgcacctggcctactcaagtgttttaatatgataatagaggtttgatagaactcgttgctcagcatggaattataattccaatagagaccctgacaaagctaaaaactgtactctcagtaagggtaattatataatgtcttaaaagcactgtaccctaaaaaaatgttgtttaatgccaaaatgctttttgatttctgcaagtataaatgaaatggctcatatttggcctctagagtttcttaacttccattatttattcagtttcagatgcatatttttagaagtaaattttgataaagtctaagtaagctacgaagacaggcaaaaagcagtaaagacagtttgtggctctaacttgaaaccattctctttgcttactttggaatatgtggtgttggaactatagaggttaaatcaaagtgggggcaaaaaaatatatacattgaattaattttgttactttttttctttgttgtttcttcacaaagtctctctttgttcattctgttccaaagaaaatcattctggcatttaatatttgttttggacaagacattcagtgttttctatagtattttgtatataggcaatattctttcatattttgctcagttgggagccattgacaattcagaattttattgtgatacatatgatccattttttaacaaatacttctggcttttataaattctgcattgtttttaaaggtttcctttgtttgtcttatatggattctctcatttttatttgttgttttgctgttttgcctccagcaacttttcttgtcatggaagctgtctgctgcaggccctttaagttctagtgatagtagaaatatttctgcagattggggagggagagagagaagcaaactgatgaatatgtcagtttttatccctgagaataggaatatcctatatatttcttgagtgttaataattttcaatcagatttttttgggaattaaagaactgtgtgagtcagtatggtatttattaacctatggtatttattaacctgtatacaaagtgtatgtgtgcatgtatcaaattattataaactatgataactcagctcttttcggtaataagtgtatttttagtgagtgcctacatagatttaatactttatttccccttaggactattagatgtgttctaaatttaaggatgactttcagtctgtgtaatatggctattgcctgtgtagacgtatatattcattcaaagcacagtgccttgacattgtgctaagtttagagtatgtggaggtgaatataacacagaatctacccttaaggagcccagagatcagtggagaggcagatatgagagcagatagctataatacagcgtataagtaagagaaagaaaagcacaaaaggggcatgcctgccccaaacctggtgagttggagaactcagaaggcttccaaggcgtagtgctgctcatggctcttacagattcatcatcagaggtttccaagaaagggtgacacagcatgagtctgggggctccagtgtagagttgttggagcacagcctgcaaggcaggggctggggagcaaggaccagcaggggctcaggctgcagtgaggttacggggccttcttgtacacagaagaggcctagaccacctgaaggccactgagggcctttagcaagatgttcggttggctgtgacagggaggcctgttgggaggaagtcagagtaattcaggcaagagattataagagtctgaattacagcaatgggagtacacctggagaagggaaaattaatccaagaactgtttaaaaggaataatcagcaacacgtgggatcaactagatgtggagttttagttgaggggaaggagtcagtgagaactctcagatgttggctggagcaacctggggggttggtcttggagcaccaatcaagagcgttaacgattaattccctgctaatgtcatttgtaagtatgtttgttttgtactgagttctcagctattaaattaaatccaccccgaagcgtattcacatttgaaagtataataacttgacagttccagtttctgaagacgacctacacagggtaagcaaatatgctcagaaaagccaaggcaacgttgtgtggagacacaattggacttgttttgtgaatctgagtagataaggatgctgaatggccttgtgggagtagcatggtcctctgctgctcggagactggaatcttgcttgtgagaaaaggagttactagtccagttactttgccccagggaattaggaactgagatttctcttcccagtgaccatccttggacccctgggaaaaggagactcattttcttgagaaagccttgatctaaacaagagtgcctgtccttgttggcttttcacttctcacccgatatacctgccacaaagttgagaagcaaaagtctgtccatacctggtttcaggtagtaagatcattaatgtggaggatacaaaaccaatattcccataatgaattaaaagtggtttagaatggaaaagcctaccctagaattaagagcccaaacttttgggaagtttctacctcacatatttaatttttccatattatttttctcttgcaagaaaataataccaagaaagccagtctctgatgaaattaaatgaagttgaaaactaaaggctatgtctgataagctctcacttgataccttttaagagctaagccaccaggaatctttgctgcctctccctagagatcaatggcctctgcctcatggtttgaggcgaaaacccttctttgatcatttgactttgtttacccagtttggacttctgggtataataaactataatatgtcagtggtgtggtaatgctagattttttttttcttttaccagagtggttgattataatgcactccttaagatttactttctataaaaggaatatttgtacttttatgtgtttgattcacacagtgcagttttctcaagtcctgttattaagtggttacattcagaaagcaaaaaatatgctgaggtagtattttcttggtgaacatctaatattttcactaaccataactgtcagattgttctgacttctgagtaccccaactgtaaaaattatacagaaaatgtggcctaatgtgggattctaaatagcctcatgtgaggcttcaaacacatggattaccttctttcatctctttcccctgaagtaaagcatctcttccaaacatgctttctccttaaataattgaagccctgtcttttaagaagctgtaaaacacttcagttgtgatgtcactagtgccattgtagttatggggattttaaatcctaaactggttcttggctgaggtttgtcaggaagggtctctctttatgtgctagcaaattttgatgaaactgggtatctgctttgtaaaaatggtacacagagatagaaatgtaaaaatctctttataacccactctaaatggacatttgggagagaaacttccccataaagtattctaatttttcctaacatttgtgttgttttcacttttaattccaaacttgaaatattgaataatagcctctgtcatttatagtgttattcttagagtctagtagattttagttgaaggtgtttattcacactaaaagaaatttgtgctaaaaacttaaattgaaacagaatataattttgtatttttctccattagctagctaaacagcagtaagcatatatttgttacatgttagactcgggggtatgtgattttggagtcagagctcaattttgtgtatttgtttcttcctctgaagaataaatgcagtagtacctgccaatattgtgagattatttcattctttttaagaagtaagaaaaacaaaagatgataaagagctttgaaaataattacaggatttaaataattacagaaatttgatatacgaccatggagtcatattaaataatctatgtgtaaatcagtaatagtaatgctttatttcagtgaagcttacataatttattgagatcctatgactgaaagtatacatagataatctccccccccaccacacccctccatattatccttgtttctaaatcatcctattctaaataggtgttttcaatttatatttttcatcactagatttataaatactatgaagggatttggaaatggtttgaattctgactctttggtgctttaccttaggaatcattatttaagtcttcattgacaattcttggctgactgagtgatgtctcttcttattaaatgtatctattcttttccttcatatatcttaaaacattttcatttaaaaggaattaaaactctgctctggttaaatttactgggtgaaatgtatttatctgaagtggtctctattctattattttaagcttaccttgaatctgttttaaaacaagtttcaaagctcacaaatcatgtgtcactggcattgatgaagttattttcatttgggtcacatttttacttcacttgagaattatagagccagctggattaactatttaagcattctgagggatcatgcttaatctgaaccctttgcacatctttctttcttagccttttgccattgctgaagtattagaaatttccaggttggttcttttaatatcattgggatcgtgtggtaccaagtcatcctaacctttcatcttcctcatttagttacctggttatgtttaacttaagagtatcttctttcatgtatgctggtgcaaaagccacttttttttgcaattatacccatgaagcaagtcacacatttatttaaaaatcagaatcctagaggtaactgttaccctgctcatttccatcttactctttattcgttttaaccagatgtaaggtctttaaagacactttaatctgtgccttgaattgggtcttcaagagataggcctttcctgtgaatttttaggctaggttttgtgttctgagaatactttgtgaagagtggtggaggagtgtcggaacagggagaaattagtgcttatggatgtcaggcaagtgagcgtgtggtgggtgggctggggatggtatctcccaggcataaggacacatggtcatagcccggactgtcctaaagggtccggtcttcccaagtcttctcatggattgtgtttgttgtttttgtggaatggttttggtcattcttcccaagtcttctcatggattgtgtttgttgtttttgtggaatggttttggtcatgttagccctagatgatcaaataaatctgtttctcagatggtgctgattaagggaaaggtataattgccactaggtacatcatgtgtccatgcttttcctcaggttctaactggagagtggattgttttctatactctcttcatagctatttgatatagttcctcatctccttatattgaagaagcatttcactcagccacctacctcttcagtatttgcagattctggccactcccagcaatcagattaatgactgtgatacttttttttttttccccaaactataccaaagctgttggtatagttgttctcaatttataaccaaagaggaaatgatataagccaaaggctgttttaagaaccatgcttcctccaaaacccaagtttaacagcctattgtgtcacaatatttttatgcttttatctttgaccaaagtgtttattttgagaaacaattattaaactgcattaaaaacatacacagtgttccagtagtatcttggttacaatatttaaaaaaaaaaaaaaaaaacagactaaggctggatgaaattgaacacatatttccatgtcagacttcctaccattttgcttgtttgtattgatttctcttgacatggtcttcttttgttgactgccactttttttttcttattctctttctctctctctctctttttttttttaaatccctctcctatagctgtatgtgctaagagcaattgtaaaagagaaccaacttatattaaatccgcctggagtcaaaatgtaatctaacacctgtagtctgcaatttgtcatcacttcatggatacttttttttttaataacagatttcctgagttttgaccttaggatactgtgtaatccaaataaagcaacaaagctaaaccatggttttttaataagtcctataatgttaggatgtgaaattacaatcataagagccaacttaagtaacatcatttgaagttagaaatagtgctgagttgtgtatctaggagaatatgttttgcctgtgaaaatgtctttgtgtgataaagtcaggagacaaatcataatgcatgtgtaatttctcctacactctttccctaaggctttcctaagtgattttctcctacactctttctctaaggctttcctaagtgatttgactcaagtaaggatgtttttactattgagtgtgattcatgtcatccaaagttttcaaactttttggtctcagaatctcttttcactgttactattgaggaccccaataatgtgttatatttatgaatattaccatattagaaattctgaggaattttttaaatgcttactaatttaaaaataattatagataatacacagtcatccccttgtatccacgggggattgattccagaacttcttgcagataacaaaattcatggatgctcaagccccttatgtaaaatggtgtagtatttgcatgtaatgtacatacatccttccatatactttgaattatctctagtttacttatgatacctcatacagtgtaaatgctatgtaaatagttattatactatattgtttggggaataatgacaaaaaatagttgatacatgttaggtacagatataaccattcttttttttttctaaatatttttgattgtggtttgttgaatccataggtatggaacccatggatatggtgggccaactataaatgcatatatgtaaatgatatatttatttcacaataaatatattttcaaaacagaaaaataatagaatgccaatgttttatatacttttgcaaatattttaaagtctgacttaatgaaagacaactggattttcataattgcttcagcatttaatctaatacaatatgtggttttggttgacgctggtgaggcaaatccagcctcaggtagatgtgtaattacaataggaaaaaatattttaatctgcatttcagataattgtgatattcttctttgatactagagcaacattctacaagtggtagtttcttaatggttagttgcaaagtggaattgaatctaaaactatattgatgaacttttcatactttttcttttacctattcataactttataacatcatgcatgcatttggaaaatactggtttactgtattttgtaaggttatgcagcccttacaaatgttggcacattttattatatgacatatttaaaagcaaaaccaaacatatttgttaaatcaccactgatatcaaaaaagttaagtattgggaaactattaagcatatggtggccactacaagtttttcaaaactctaatttttgcttgaaaggttaaaaggtataattggcaacaaatgctgtcagatatttttcctggagtgataggctcactttagttttaaaacaatgtcaaatatgcagatccgaataaccatagtttgtctttagttgttctttcaagtcaaattgatactccatgacaaagatgggtggctcagctttcaagtccaacaatgacacaagtgctgtttctcaagacaaccatcttccctcagtatgctacagaagtacttcatatgcgcttcccatttcttcacacagtacattaaaaagacgtatactcaaggattgagacttaagtaatacaattttactgcttcatcaaagatgctcttaaatgaaagtggcatcatttttgccatgagcgtgtggcagtgaaaaatacaactgcctggaccatttggtgctgctgctttgattgttgcaggccagcatttcccaccagtgcttttgtaccattggcaaattttgaagtgtggtctatgcaataggcccacaacattgaaactattttcatagcaaatccaaggcattatttacctttttgactttgctgaaatttgcagatggtacaaaagcactggtgggaaatgctggcttgcaacaatcaaggcagcagcaccaaatggtccaggcagttgtatttttcacagccatgagctcacggcgaatttcagcaaggtcaaaaagtttatgtttggctgggcgtggtagctcacgcctgtaatcccagcactttgggaggcagaggtgggtggatcacaaggtcaggagatagagaccgtcctggctaatacgatgaaaccccgtccctacaaaaaatacaaaaaaaaaaaaaatagctaggcatggtggcgggcgcctgtattcccagctactcaagaggctgaggcaggagaatggcgtgaacccaggaggcggagcttgcagtgagccgagatcgcaccattgcactccagcctgggcgacagagtgagattccatctcaaaaaaaaaaaaaaaaagtttatgtttatgttgtaaataatgtcttggatttgctatgaaaatagttttgatggcatgggcctattgcatggaccacactttgagaatcattgataaagaatgtcttcctaagaggatgtcaggctgtatgtatagaaggtgtcaccttaaacagactgtaacttgaggctcaatttcatgtaacatatgcttcagaggcaacttttctgtgccaggtgccattttaagtacaaagatgtatgtagtatttgagtgaaagaaataagaaaagttatcagtagatgtgcctatttgtagatctgtggggtgaaaaaggtttctgaatttgttgcttttataataagcatgttgatagaaaaaatgagtgactcattatactcctgattcttaaatactcctcacgttttgtaataactactactaattgaaaccctacttatgacttcagaactttgctgctacatacttagcatatattatctcactttccctcctaacactaccagcactacaaggaagattttacagattaacaagcactgtggctcagagagagtaagtaacgtgctcagaattacaaggctagtaactaagcagttgtggttttgcagtagaaactggatttgaaaccagaactttgtgacctcaaaacttctccttaccacgtgtatacaatgccatcttataggttatacagtgccctaggaatttttttttacacagaaaagaattatatccctactctcagatacacactagatataaattcctgtaattagtgatagcttctttattttttaaacattcttttgctaaaaaggaataatagcaagaaaagtaataactagttttgctgaacaagaatagtaactgatctgaaagtaaagaagagagaatatgggccgggcgcagtggtttacgcctgtaatcccagcactttgggaggccaaggtgggcggatcacgaggtcaggagatcgagaccatcctggctaacatggtgaaacactgtttctactaaaaatacaaaaaattagctgggtgtggcggtgggcacctgtagtcccagctactcgggaggctgaggcaggagaatggcatgaacccaggaggcggagcttgcagtgagctgagatcacgccactgcactccagcctgggcgacagagcaagaccctgtctcaaaaaaaaaaaaaaaaagagagagaatatggaatgcagcgccacagaacaaagatactgagcactaattgtgtcccaggcatatggtatgccaatatgtagctcacagtccaacagtgacggagacataaaataattacattgatatttacattagttattaatcattaaagttctccttactgaatgtttgggccaaaattaattgtccttaatgctgattttgaaaaaaggggaatattagagggtagagctaggtttttgaaactttcaattacatgatattttatatatagtccatttaaaaaataatagcatgtattcaatcatctattcaacaaattctaattgagttatgcataaggactttcaaccaattgttgttacttttaagtaaaaaaaaattgtgtgtgtgtgtatatatctcatatcatcttgtttgtgttctcatctcctattaatgtaccttagcctacaggacctgaagctttgggtgaggcttgtcatagagggacagacgtgaccacctgggaaactgttttaacctattactacactggatcaaccaccttatacagtcacctccttaatgatttctcatatatatgtatatatacacacacacacacacacacatacatacatacacacatgcttttttttttttgagacagggtcttgctctgtcacccaggctggagtgcagtggtgtgatctcagctcactgcaacctcccgctcctgggttcaagcaattctcctgtctcagcctcccaagtatcgggggaacctgcccttgatagtcaagtaggttcttttctattttccctaagtgtcggccagtctgagaaataaagggacagagtacaaagagagaaattttaaagctgggtgtctgggggagacatcacatgtcagcaggttccctgatgccccacaagccgcaaaaccagcaagtttttattagtgattttcaaaaggcaagggaatgtacgaatagggtgtgtgtcacagagagcacatgcttcacaaggtaataagatatcacaaggtaaatggaggcagggcgagatcacaggaccacaggacaggggcgaaattaaaattgctaatgaagttttgggcacgcattttcattgataacatcttatcaggagacagggtttgagagcagacaactggtctgaccaaaatttattaggcgggaatttcctcgtcctaataagcctgggagtgctacgggagactggggcttatttcatccctacagctgtgatcgtaaaagacagccacccccaaagcggccatttcagaggcctaccctcagggacacattctctttctcagatatgttccttgctgagaaaaagaattcagcaatatttctcccatttgcttttgaaagacgagaaatatggctctgttccgcccggctcaccagcagtcagagtttaaggttatctctcttgttccctgaacattgctgttatcctgttctttttttaaggtgcccaaatttcatattgttcaaacacacatgctctacaaacaatttgtgcagttaacacaatcatcacagggtcctgaggcgacatacatcctcctcagcttacgaagatgatgggattaagagattaaagtaaagacaggcataggaaatcacaagggtattgatcggggaagtgataagtgtccatgcaatcttcacaatttatgttcagagattgcagtaaagatcggcgtaagaaattataaaagtatcaatttggggaactaataaatgtccatgaaatcttcacaatccacgttcttctgccatggcttcagccagtccctccgtttggggtccctgacttcccgcaacacccaagtagctgggattacaggcgcgtgccaccacgcctggctaatttttgtatttttagtagagacagggttttaccatgttgtccaggctggtcttgaactcctgaactcaagtgatccgcccgccttggcctcccaaagtgttgggattataggcatcatctaccgtgcctgaccttaagtatatttttcttggaacttttagtaggataatgctttccttttttggatcacagtttatgttctgttctaaaaaatgaggtaaaattggacaacaagtcaaaataattctaatattaacccaaaataaacgtggataaaagtcattttgtttgtgttctcatctcctatgaatataccttaccctacaggacctgaagctttgggtgaggcttgtcatagagagacagacgtgaccacctgggaaactgttttaacctattactacactggatcaaccaccttatacagtcacctctttaataatttctcattttctctataaaagaagaccacaaagtgttggcatattataagtaatccagctcaccccataatgatacagtgaattacatactttcctaaacttaatcattcaagatctcacttccttccctacaggcaaaaagcattatattttacacttggctcccagctggttttcattgaggccttcagaatccatttgaacactgagagctttaagaagagctgctttatctttcttagtcaactttggtcatggtaccattaggtctttttgttttcaaattttgaaagcagagaaacaacatgtgtccatattataattgtgctttatgactgggcaaggaactttgggtttcatttgcagttaatgtctcttttgagtatatttacaacttctcattcttcattgccatcttcatgcccatttatagacatatgtgtcacatttcagcccagagagattacagcaaataaataagaaacttactagacttttaactttctatttgtttattcctacccataacttattcatcagaccttaattgttggaaataggacttcttattaaaaagctgtgtaaattaataggtccaattattgtagatactccataaatgtttgatatatggatatactttttaaaaaattcttttaacccagggctgtttttaatatcatttcttttagatatgatgaacacctctgatgaagaagacaacaatcagttaaatgtaaattaaccattcttttgagggtagaagtgccagtgcatacttctggctgtgtttatgacaatgttgctatttgtaatactccgataaaaatccagtgctatattacaaactgaatttttcttactaagtaattatttaaatattttcccatctctctggtaatagtagcagttttcaggtcttagtatatttttggctatctcagattttatgattgaagttcattgtgagggctttccattaccctgatggtggaatgccaagcactccatgctctggccgtgtggctctctcaggtgtcattttgctggagcatggtactatccaacagtactttctgtgctaagggaaatgctctgtattgtgctatccatcatggcatcgcacaagtgacacaatggggcacttaaaatgtggctgatgtgactgagtgaacgtttgtttgtttgtttaattagtttaaatgtaaatacccacatgtggctagtggctactgtattgggcggcacagctctaacgtgctgactttcttgcggttttgcaattgtaccaagtatattcttgcctggcagcctttttgtttgcctttctgttatctggaatgttcttccacatggctgggcttcacatcttcatgcctgggctccaatgctgcctctgtagggagccttctctgagtcaccttatctcaaataacttcccctccccacaatcttcctccttatgcattgctctatgtatttattactagctgatattttatttacgatctatctcctctactctaaagactttgttcaatttttctctatattttactcatagaagtcaggagaccataatgtttaagggcatgggctttaacatatgcttgaataagatatgcttgacaagcccagttctgctgcttgcaaactctgcaccttaaacaaattatctacacttttggaactccagttttcccatcataaagtgggggtaaaaatgcctgcctctaagagtactgtgaaaattaataacataaaatatatttatagcatttaggtcaatgtgtgtctcatgagtaagctttatatgaatggtagcacctattactactattattattgttattaaagctacttagatatttcattactgtgaaccttgcctgtcatactgaaaaatcaacagcagaagctatgaaaaagaaaggcttttaaataaaccatttaggactctctttacagaaatgaatttgttgtctagattaaccttaattttgatggagaaaaatccaaaccaaaaaaagaaataggatgagttgataggcttcagtgtgcaaagatcaagagtaaaaaggagtggatagttacccttacagaattaaatattccattatttgggaaaatcacatgaagagaggtgtttgccttagggataaataaaggtcaactactaagcccatttttttaaacttttatatcgaaatatgttatagtttgcatacagtaaaatgcacagattttaattgtacagtttgataatcttttagacatacacacatccttttaacaaacacacaggtcaatatagagaatatttgcaacatcccagaaggctatcttccacccgcttccactcagtaaacctcagtggaaacccattatgctgggatctgtcaatgcaggcttttcctatttttttctactcttttatattaatttgtttttcctattctttcacataagtggaatcatacagtttttggtctttcatatctgacttctttcactcgacagtaagtctgtttttatctatgtttgtgtatatagcaatagttcatttttcctactgctcggttatataagtatactacaatttatttatcgatcttattattggtagacacttgggttgtttctggtgatgactaaaactgctatgagcatgcgttttagaggacataggcattcatttctggttttatacagtgtttgtatgcatggcgttagtaggtactatcaatggggatttttttttgcccctccactgggcccattttgaaaaaagggaaaaaggtaatgctggaaagaccttggtcctgccagctttttcataaattgttggaaagatgctcgattaatataaagaaaatctcagaaaattataatctgactgcataaaggactagtttggaaagagaattttattcattttgcagggcattctcttagttggagtaattgtgaattttgtgacttaaaatattaattaacaaaaaaattatgcccaaactgtcaaatgagcctaggaatgaaaccgcttataggtctctccatcagcaatcaatggcatgactctcagggcacttgcttgggacagagaccaaatttgattcgttctagttcactaacagggaatttagaagatgttctgagagattcagacaaaaaacaaaacaaaacaaaacaccaaatcgaaatatcagttaagtgagagttcagaaacttttcctgtgaagaaatggctaaaagagttgacattatttagtcaagatgtgagaaagtgaagaaaagatgacttgattctgtcctttagatgggaggattttagaagaggatttggattggttttcatgcctagagaagaccatcttataggcattaggtactgctctcctttcactcagagtacgtataccactagaataaagtactacatggtattaggaaggattcttagcaattggctagagagcaaattatgttgttcttttgctaggaattgtctagagacagtaactctctgcctggagtaattagaacattttaggggaatacagatagttaggacagataactttgggaatcttttaatctcagatattatgtatattgcggttgaaagggacttatagccaaagaaaagtgtcagtataatagaaaaagctcagctcctttgctaacttgtaagacagtttcactttagagatgcccatttggacattcactgttttgactgctctttccttacctgttagaagatgctagaagatataacttaaccatcttcatgtagatgtcatcatggtgcccaacccactatggtacattgtctgaccagaaactatatatttcactttgtagataatttctctgactattacttctcttgagaaacatcttcctagtctgtcatgggcagttgccttgtcattgtcccctggaaaccttctttatcagactgacaactccccatgtttgtaatttccaattcggaggagaatcctccgaattggaattaagaggagatgctacatgtttccagttcaatcttgaatccaaatagcacctttgtgaggaacttgtcaggattcagttaattaatccatgtgaagttcttagaactgcctggcacagaataaacattcagtgaggggtagctattcttactgttctttctctgtttcatgtttggcttctctgtacatatgtattactagtgctcagttctaggaaacaaaggggagtgaagcaggctagttggttggacctaaggagaagaacaaatgcaatcatgcagaaagattatagtaacttcaaagtatagttttggaaaatctctttaaatctaaccagtgcacagtggaaaatccctgaagaaccaatctaattattcaattaaatggaaccgttatgctgacttttactacagaaggcaagcataatttagaaaatggggcattttaattctcttttgttttccaattagcgcaattgctctaatggggagtactcatgcttgagtctatgttcttccagtatatactttgcacataatttcagtctctctctcccccaaaattggaatcctcacctgttgacatagaggtttacttattgcagtgctcatactgcccagatcatggcctcagagcaaatatccttctgccatgaaagtggacctgaccagcaccagtccccccaccccccatccctggagctctgcttttcctgccgggtataattaggatgctaaagtaacggagctctcactttttttgctgatgccagcttaccacaacagaccacatgagtttactcttagttgaaagtggtaaggaaaatgctaagaacattcattttaattggtcaacattatgcagactttagtgccactgttttatagtcctgtgcttaggatttctttctgccactagccgtcagcttattatagcagatagtcttatttgcttctgattatcctttttattattatttgattattgattattacttgaaaaatttaaacttcttttgtttattgctaccttatttaggtaacagtttcatccgccctaatatttgttaagttctacataaaagactgacagtttcacattggtgggaaagtattttttcatcatatggccttcaagaccaggatgaatgacagatttttttttttcttaaatgcttgctttgatgctgatgtttcatagctaaaagacatggatcatatgggtagtgtgtggtggtggcaggaaaggtggcagggatggtagtgtgaatggtcctttaatgtaactagacgtgttttctttgcattggttggatttattcctcctgaactctggaaaatgtttaatttgttattctaaaatgaaaaagatccataaaatatgagagaatagtaaaaggagaattgtgttttttaaaaagtgaactcactcttcttaaaagttttgggaggatttaggaagttaggcactgacctaagtataggaaatgtggtctttgcctttggagccaacatgacacattttagtggggaagagcacagtaaccttgtaattctgtcatccagctgaagctgtaaggtgtgggcgatggctgcagttcctcatcaggacttcatgttccatctccccctccacaaagtccttctcacataggcctgtggggagagccgggactgagttcctttgagtaagcttacctaagattttgcttttttattaaatgagtggggaataggtagaaataaaagaaaaattatttaaattacaactagaaaactttaacattaggagaaaaaaaacccagaaattacaaagtatatgcaaaacagaggattaattagtttatagtgattttgagaaggtctatctatgttaagtataaaatggtcgtttaaattcataatttaagaaacagttatgtctttaaattagtttgaatattttctcattctaaaaaatacatttaaaatcaaaagactcaaaactagaactaaaagaatataaagtcatttctaattttacaaaggattgattttctggcttaagtaccaattattcctctataacactgtaagagtcattatgaagctgataataattactgtcatttattggatgtttgctctaagccagagatgaggcaaactatgactcatgggccaaatttagtcttattggaacatagccatgttcatttgtttttgcaatagaatagaattgagtagttgtggcaaagatcgaccctccagagcctcaaatatttactatcttgccctttcctgacaaagtttgccaatccctgatttaagacaagcactgttttttgtaacaattatgtcatttaatccttacaacatctctaggaggttggtttcttatcctacttttatggatgatgaaatagaggctgaaagatattaagtgatttgcccagggttactcagctaagtggaagaatatgaacttgaagccatgatgatagagtccatactttcccctttgtgcccaatttctttgtcgttagccttcagagaggtggcatatcttggtggttacaggtatagaagactctgaagccaggttgcctaaagtgagatgaccttaggcaataaatgacttgactttgcatctcagaatataaatgatggcaaatactactgttatgaacctcctgttttgtaggtgagatactaaatgtccagaaatgcttttaagctttccaaagacctgactttacaaatgactatagcttacctccagtgctagatagataacacatatttcagagggctgatggttttggaaaggtaaaatcatgagtccagtgttcatttttttctctcttaattatcaggtacttcatagacagcagtctcagccagccaaggagagttcccctcccagagaagaagcgcctcccccacctcctccgactgaagacagttgtgccaaaaagccccggtctcgcacaaagatctccttagaagccctggggatcctccaaagctttattcatgatgtaggcctgtacccagaccaggaagccatccacactctttcggctcagctggatctccccaaacacaccatcatcaagttcttccagaaccagcggtaccacgtgaagcaccacgggaagctgaaagagcacctgggctccgcggtggacgtggctgaatataaggacgaggagctgctgaccgagtcagaggagaacgacagcgaggaaggctccgaggagatgtacaaagtggaggctgaggaggaaaatgctgacaaaagcaaggcagcacctgccgaaattgaccagagataatgtgaacttctactaggcaaagcaatacatcggtccaaggattttctgctttcatttctttaaaagttttttgttagtttgttttttgtttttgtttttgggtttttttggctttatttttgtctttttatgtctgttttgtttttcttacccttttggacatttctttgttgcacaggatacacctatagactgaataagttcagtatttccgaatcagacatcgccttggcaaagacactaaagcgttacactttatcccgtctctatgactggatcatagtcattataatcacaggagactctgccttcattatccttgcacttaacggaagttacatcaggcaagtaccaggatgaaaagaactatgaaataaatgaaggaagctacaagtgtgtgtgtatatgtatatgtatatatctctatatttacatatatatattaaaattgcatgggacagagactttgcaatccgaaagaatagactgtgaaatgagttcttaaagaaaagacttgtttatgtattaaaaaaaccacttcacagtgagtcgctttggctttttgataaactgcggcctgctctcagggtggggtgactatttttgaattcctatttattttttgtgtttgtccctgattttttttttttaattctatggcttcctatctggcagcttaatgggtaatttttgaggtatgtatttaacaaaataaacgacactgccgaaaaaaaaaaaagtgaagtgaaaacaatcagggcacattaaaatgatacaagtcaaataaatcttaaagacacaatgcacacttaaaatgactcaataaaatgacttgctacgttccgttattcaatttgtcattactgtagtgaacagatgcatttctgtggaattccaaataagtaaaactgaaattcagtgcagagaaaactttgtccactagtgcaagtcttgatcaaatgacattttgacattggacatatggaattcatagtatgagccacattttgttgtgaaatttatttacctgcttgtggcttcaaatctgaaaattaataagcctgctcgtttaaaagttgtttgttgttgctgtttttttgtctttttgttttttactagaaaatagttcagtgtaatattaagttagaaaagaagttgctgcccagttaaaggggctccctctcaaataaatctccatccttccctctcccaaaagacatttctgatttctgcttcactttgggcttcctcttcttcgtacacattccatctacctaatcaaacattttcagtccctgatctctcctgtcccttttcctgggatgacagccctaacaagaactgtttttgaatcgttgtgcagctccaggcaatagagtatgtgaagcgatttcagtagaatcacttactcatcctaaaagaaaacattatcccagttacctacatcgcaattaccttatgtaaagcagaactaatgctgactggatgtttaatgggatgagcattaaagctgcaatctactatagtactccagatctctttcggcttcctatgagaaacaccagaagcattactttccacttctacttacagtaattgcaagaggagacctcacattcaggactggcctagtgaacgtaatccatgctttaaactggccattaaacagtcccacatggttggattttttttttttttttgagttgtgctttcacaaaaccttgtcaaagacctcatgcaatatcactttgaaagttattttctgtttactacacaaacattgtaatataactgttaatactatttatatatttgaaaggtataaaaggtaggagttaaaaaaaaaacctctatgtgtagatattaactcagaacttacaatatacagggagaagacatgttgcaatacaagctaattctagctgctcagtaacctctggagtttttaaagggacattttcctgtactttttcaaataatgatgtttaaaaattatcttgacataagcgtcatatacctttgcaaaaggatggttgtttgcagttagccctggccccatccttcctatttctgtagtatgctgcagctttaatcagaaagtccatggttgctgcttcctgatctccgagttactctttccaaattgtcttcttacactgttgctgaaggtcactctgtacacgtaatggaaactgattttgccaagctcttacaaggtggttcatctatcgatggcatccgcatttggtatcttttacacttcaaccaaaaatttattaggtatttttcaatgctaagtcttgccttttattttttaatttcactgccaagtttgcagtggttctaagtgaatctgtgggcattttagcctgtggtcttgccagatctttgcgaattacaatgcatatatgtctatttattcaatatctgtcatataatatctatttggaagaagaaactttctcttgtagtgcctcttgacaaagcacaatttcccgcctttttttttttttgtgaaatgaaaaaaacaaattgtgttttattgcggtatcaacaatgtgaataaggattaacatattgtaaatgttcttttttccatgtaaatcaactatctttgttatcactaagtgataattaatttttaacttatgtgcattgttaggctgttagaattttttggttgttaaaataaacgcattcaataaatatga

SEQ ID NO: 308 - DNA, 9858 bp, Homo sapiens
agacgttcgcacacctgggtgccagcgccccagaggtcccgggacagcccgaggcgccgcgcccgccgccccgagctccccaagccttcgagagcggcgcacactcccggtctccactcgctcttccaacacccgctcgttttggcggcagctcgtgtcccagagaccgagttgccccagagaccgagacgccgccgctgcgaaggaccaatgagagccccgctgctaccgccggcgccagtggtgctgtcgctcttgatactcggctcaggtgaggattcaccggcgctgaactgctgggctctcctcccatggcaggttttgcctcttgagtttggctcttgcttctctaaaaatcgccctttagttcccccgaccctgcgccgcaggaggtgatcactgtagctccctccctaggaggaaaagagaagggcagatgtctcaaacgtccaggacaaggtgtcccagagaatcgctgtactttttctttagttcagctgagaagacgggagagatcatttgaacctaacccttcgtttcacagattaaaagattaaaaagaccaagatctagagaggtgaagtgatttccgcagatattggacccagcagtgtttgctgcctcctgcctaattctccatctctgtctagtgatttcttctttaccttcctagagggacttagagtatcccggcgagaggttaaaagcaccactctgatgctgttttattgagacctaagaaaaagcaagataaagcagtggcttaactctgggccccaaatcttacttagtactcagtttattgtctatgtagtaataataataatgataatgaaaaatgacaataataatcgatataattaaccactgtttatattattttaaaagattatcttttaaaaatatcttttaaaaatatgaacacatcttttaaaaatatcttttaaaaatatgaacacatctgaagaaaatctgatatttgtatctaaaacctaccgaaataggccaggatggcattctagcaaaaaaagaaatgcatttggaatgtgaagtgatgggaatttttagacattacccatcaagtaattgtattagattaatttgccaatttggcgggatttttttgatgtggaaattaatgtggattatctgtggaaaagaaaaacttcagaaaagcacttctgtaattgggacagctgaatttgcttgctggcaaaaatgtaaagtttctttcatagaaatgactcaatcacaaacaatagcacatgtgcaataactgctttgatgtcaaaagataaacttttctacctaacacagctgactcgaaaggcaccctactttaccttttcttttcttcccttattccctcccctgcaggccattatgctgctggattggacctcaatgacacctactctgggaagcgtgaaccattttctggggaccacagtgctgatggatttgaggttacctcaagaagtgagatgtcttcagggagtgagatttcccctgtgagtgaaatgccttctagtagtgaaccgtcctcgggagccgactatgactactcagaagagtatgataacgaaccacaaatacctggctatattgtcgatgattcagtcagaggtgagtagaggataaagcaaaaatatggcctgtgagatgtgggtttatatgagcaaagctgcttcagaagtaaagctgctccccagattttctagtggctttattgtatgtctatctgttggatagcccctaggtaaactgtgacaaaaagaaccataatgtgggcacatcctatatggccagagtgatcataaatggtgtatgtctcatttttaaacctaatcttcacaatgactttaagtaggaattgttatcctcattttacagatgtgataactgaagccgaaaaaggttttgctctaggttctacaggtgacaagcagatgagctagaattagagctccagtctgtttgattctatgcagaagagacactaagctctttcccactatgctacatgacccccattctgagagacaaatttagacattaaccattcctatctactttgtatcttagcttttgtatccccttccccaacaccacccttccccagataactgcattttaacacaaataaggggacaaggaagtaatgggacaggaggcattagactttagcgtttaagtactaggtgatgagaagctgatggaataataataataatgccatctggaaatattaaagaagggtgaatatacttagattttgtattgctaaaatcactctttaaccccaaatcccatttgttagttatataacccatggtttctttcactttcctgttatctcatattttaaaaaggccctttgcttggagtgaaagtaccaaagtaagagagaaatattgcatactttggagtctgaaggaagaagaagttaacagtaaataagatctaaatatcctaagagcatccactacagaggcagggcaagatggtttcagagctgttgaaggccttttctgtcctgacttgagtttccctggcttctccccctcttgtctggttctcagaactggtgaagggacatcaagtggtaccagagggacagtgacttgggtgagtgggaagtgagaaaacctttagcgaacactccacttaattcccttccttctcaaagtgtgcttttctgtgaggtgggtaaggggttcatttgtgcttatttttgaaggcatgagattagacccatcaaggtgtctagaaactgttctcttaaacatgtttcaagttgttaacacttcagaaggccaagtaaatgattagtagtacaaatgatgactagtgctcaaaattgcaatgcattgtgaaatagagtgaaaatgttggctgaacaccttcgaaaggctaagttaaatgtccatgatgttagtgcttatcgcaacacttcagcatagtgacttttttatttgcctctgtctatagtttgtaatctatctgacaaagtgaagttacaacgttcattcaaaatatttctcttaaaggacttttctgtcttgtgcttttttatcgtcagagaaaagtttcaatataaaaattgcataaccacctcttaaacatttgctactaattttacttttgttaaatgttattataataaactgctaaaatactcagtatttattttccatttccttaatcacagatattctatctttgataccctagttgaccttcactatgtttctaatgttttgtattgaatgggtgctgcatgaccattatgactaatggtattttctctttactgaaatctgtttgctaaatattcacttggataaacctcttcagacattagtgtaacaaaatgcacagcactaacatgcaaagccatttgctatctttagtatgtgggtaaactacaccttgcataactgcaagactgaacaaaagtttctgtggatcagataagataaatctctgaagcactgaatacaaatattcctgggctcctgttttcaaatagattgaccacgaaaatgagctccatggaaattatcaatttgattataatctgttgtaatctgggtgttggagcattgtaacatagagtaactctaatttataattctcagttttttccacctgcaagtagtactcactaattcccaactataatcatgagtggacactactttcaggtagaaaaaactgaaaattataaattagggttatgcagtcctctctaacttttatattgtgttaggtaatgaggcacgcatggctgttacccctgtgagcgctcactgctatgacatctttctctcatgtctctaaaattatattcaagtttgagagactcttgtcaataaatcttttcttttttagttgaacaggtagttaagcccccccaaaacaagacggaaagtgaaaatacttcagataaacccaaaagaaagaaaaagggaggcaaaaatggaaaaaatagaagaaacagaaagaagaaaaatccatgtaatgcagaatttcaaaatttctgcattcacggagaatgcaaatatatagagcacctggaagcagtaacatgcaagtaagttttcctaaagcatatagaattctgtatttctagcaccatgtctgaaacccctaactgcaggaaaccatttatttttccaatgtataaaccaagggtcagtaaactttttgttaaagcaccagatagtaaatattataggcttagtgggccaagattgttacatgtacttaaacaacgaattaaagtgtaaccatttaaaaatgtaaaattggtgggtgcagtggttcacacctgtattcccagcactttggggggccgaggtgggcagatctcttgagcccaagagtttgagaccagcctgggcaacatggggtgaaaccccatctctacaaaaaatacaaaaaagtttagctgagtacaatggtgacagcctgtagtcccagcagtctgggaggctgaggtagcagaattaattgcttgagctcaggaggttgagactgcagtgagccgtgatcgcaccactacactccagcctgggagacagagcgaggccctgtctcaaaacaaaacaaaacaaaaatgtaaaaactattcttagcttgcaggttgtttaacaaaacaaaaaagcagcaaatggctggatttgatccatgggctgtagtttcctgacccctggtataaaccattattttttgtgcatgctcctgcttgctctctctctctctctctctctctctttctttctatatatatatgtatgtgtgtgtgtatgcattttttaaaaactcctttaaaaaaggacctaaaggtaatttttgcataatctttcacattgttttaacctcctccccgcttacctcccacaagcagctagcacattaaataatattggaatgtatcaactgcataacaaatcactgaactcatcagttggtcataaaagaaacacaaagaatgacaaggcgtgtcttcttgaactatcacacccaaactaatctcaacttgttcttatactaatagatccttagttagaatgcattctgtgtctcattatttaaaatacgagtatatggcataacttttttaatgttggaattaaatggttctttatgatctggagagtaagcttaaaacacaccgcacgtttttgtgattataatttttaaatgtgaattgcttgcagatgtcagcaagaatatttcggtgaacggtgtggggaaaagtccatgaaaactcacagcatgattgacagtagtttatcaaaaattgcattagcagccatagctgcctttatgtctgctgtgatcctcacagctgttgctgttattacagtccagtaagtatgacataacttacaaattcttaataaaataatgggaggttaattttttcagtatttctctcatactctactctggtattttagatgaattattatattgtcacttgatctttggtttatatttttatattttattgacaaatatcacagaaagtggtcaatgtttatgacttgtggccaccattgaaatttaacatgtaaagcccttttatagaagatctagaaattttttgaacttaagtaattgaaggttttatttcatgttatttttctactcatggttactttagaatctcagaaaatatttatatctactgtgaaatcctatgcttcatcaagcctcaggagctaattaagacctgtttataggaggttcgtagtatcagacatactgctttgatactaaaaacgacaaagaactacaaatcatcagcagtaaagaatagatatgttttctgctcatattagaatgcaaaattctgagttaggaatattataacatggtactaatttacttagagcttatgcttattttgttactatcgaatatgagaactcaattattaaaaataaatttccatcataagacatggcatagcaagcaaggacaattctattactgtttcactccagcgtatcttccctgtgctcataataacagatcacacacttcacttcatggccagtaaatgttaggactagactgtcccaggtagtaggcactgatgggtgcatcaaaatggcattgtctgtcaaacagaagtcactgaataagggaagttgggggaggacatgaatggctctgtgatgactcatgtgctactagagcttgggaaaagcaagggactcattcttctaattttaggtcttggtaaataactttaacagctatccacttgtgtacatgatctaccacgactaccattcaggaaacaaggggttatcttctgccattgttgacaattattttaaatttagatgagatcatcataacatgacacataaaaattgtttcatcatgcatatcaagtttgatatgtagcttaaatttattttgcacacactagaatttgtcctggttttctagtacctcaaggcagatatgcaaaggtgtttaggagacatactctcagacaaaccattattattttaaaggatagaacaaaacaatcgctagttaaggaagatgttttgtaataattaaacttgtaattatttgacttgaaatatttaatcatttttttgggaaagaatggatagattttgttaatgttagcactcttaaaattaagcagtggcttttttccccgtgtctcccatattctccttgtgtttgaaacataaaacaaacactaaacctaagcaaaagttgctgggtttgttttcataattgaggtgagtttttccctcaactattacaataaaagaaaactttttatgattttaatgataatgttttgtggtgggttaaagacctcctaacaacagggggtttttatacaacaacaagaagtttttaaataattgagtttttaaagtggaaagcagcagtaaattaaactagaaggatatattttatacctagaaataaataaagctcaacttgttttgtaagcctgttttaaaaatatttaatcatttaatttgtgcaagtatagagttctcctatggcaaaactataccatcatcttctccaattgtgcatggcagctgtactaagttctgcaaaaacaagacatatggatgtgtttcataccttctcagaattggtatatcaagacacatttaaatataagccctctggaaatggatttatatacagtcaacataaatacccccttagaaattggtaatattttatagccaggtttaggtttagtgtcaagtatagtgattgctggtctatcactactcatgaagtggaaccccctctactcataaaaaccccaatcaaacatatagatgaatagaaccttgataacattagaatgccttgttctctgaaggcttagaagacaatacgtcaggaaatatgaaggagaagctgaggaacgaaagaaacttcgacaagagaatggaaatgtacatgctatagcataactgaagataaaattacaggtttgagttttaaaatatatctttagatcatatcctataattttgaaaaatttaacactatataatctcaagaaaaatatggaatgtgttcttaattatatatacactatgaacaatggctatgttaaagtattattctttgagtataagatggaattcaatgttgagaatagactacgtgtttaataagtattattagggatataaatataagagacactggtccagttctcaaagaagttattgtttagtagataggaaaaaaaatgtaagaaaccagaatactagggatgtaaaataaatgtcatgagaaaggaaccaatggagtatgagaagtttccagtgaaaaacagaaagaatccagtagaatttatttagggaagaggaaaagatgtgttcggggtggccttggaagtgaacgttgaaggactagtgagattggttcaagaaactgtgaagggaaagaaagggttatactgagaaatggaagagataattttagaaacttgtgaaaaatggcttaatctaaatgagtgttaggggagatacagttgtgatgataggttgagctcacatggtggagagccacagttgcgggtgcttgcactgataatgtgagggcatggagacagacaataggttgaatgctctttttttacaaaaggaagtagaaagggagggggatgtaaatttgataaataggttggtgaaaacttatattttcttgtaaagagagagaactgagcatgttgtaggtataaggtaaaaaggcgtgaagaggaatatttcgttgataatgaaagtgagcagctagggaagaaaactcccagaggaagagggaggcaaggaaatcaagaacacacttaaagtttgtcagaagaaggaactttatttccttaaacattcaagaaagatgatgtcatttcagttattgattgtctaacttcagtaggtttaagagttacttgagggctgggcacagtggctcaggcctgtaatcccagcactttgggaggctgaggtgggcggatcacctgaggtcaggagtgcaagaccagcctggccaacatggtgaaaccttttctaaatatacaaaattttctaaaaatacaaaaaattagctgggtgtggtggtgaatgtctatagtcccagctacttgagaggctgaggcagtagaattgcttgaactgcaaggcagaggttgcagtaagccaagatcgcgccattgcactccaacctgggcaacaagagcgaaactccatcttaaaaaaaaaaaaaaaaaagaattacttgagatgcttgttgaatatgcatattgctaagcccagccctaaatctactgaatcagaattctatttttaatgtacactccagatggttctgatacttgaacaacgctatatttagcattggttaagtacagatattttgtttttagcctattgcagaattagctcaataattcataaaatgggtaattattcataccaatgctaaactcagtatttattacatcaaaatttttaatgtattggctaattttggtaaagctaagaccaccagtgtgaataaggatggatttttggttatttgccactgagattttttagcatagatcccagaattattttaggaaaaagaatatgctgtgctagcacatagtgggtgcctattaactggtagttactattattatgcccttggtactaattttcctaaattaactatatatcataaatatgctgagacagttaatctttgattttaattatgtccactgcatagatttggttaggaaaactatttctcatgactgctgttgcatttttattaagcagaatttgatgcaacagatttgagcatatgtggacttctactgaactaggtgtataatcaaagcaagtgtgaaagaggaactcaagccgaagtaagagttggtctctgaaaaatcttagcatttctcaaacgatgtactagaaaacaactgacagaaattctgattcctgattatgctttaaagtttcttaaagctctgctggaattgagcttgtctgtaacattttgttttattttattattttattttattttattttctcacaggatatcacattggagtcactgccaagtcatagccataaatgatgagtcggtcctctttccagtggatcataagacaatggaccctttttgttatgatggttttaaactttcaattgtcactttttatgctatttctgtatataaaggtgcacgaaggtaaaaagtattttttcaagttgtaaataatttatttaatatttaatggaagtgtatttattttacagctcattaaacttttttaaccaaacagat

SEQ ID NO: 309 - DNA, 9438 bp, Homo sapiens
atcatttttttttctctattaggggaggagcccgtcctggcactcccattggcctgtagattcacctcccctgggcagggccccaggacccaggataatatctgtgcctcctgcccagaaccctccaagcagacacaatggtaagaatggtgcctgtcctgctgtctctgctgctgcttctgggtcctgctgtcccccaggagaaccaagatggtgagtggggaaagcaagggatgggtgctggagaggactggaaggaggtgaggaacaggacatgtggctgggagacaggctggatgcagctgggataccctggcatacggcaggaatgggtgcccaaggctgtcaactccctcagctcacacacttccaggagcattcagggagcctctgcgctggcccgaaataagaccttcaggaatctgaatctaaaacccctagtttacagtgaaaacaaagactccaaagaccaagcgacctgcttggggtagacagtcaggacggagtaggaaccatatgcctggagctgcttctgctcctgttccttccctccttccgatggctgggtacacctgcctgacgctgagggaaagagagagcagccccaaggggaaagtgggaaggcaggttggctggagggatggtgctagaaggaaacccgtgcccaaatcccacactcagacaccactgcagtgggtctggaaggcgagtggctggaagagaagagagtgggagctccgggagatcaagagtcactcctaggataagggaaggaggctgtttgtggcatgagaatgtgcaggataaagacatggaagcgaatggcttctcagttgtgtgagtttaaaattcatgacatttacaaattgtcagaaaaggtgttatatgtttgttatataacaatcactttggaatgttaatctgattctgtgccaaaatctgaattactcagggttctccagagaaacagaactaataggtggtacacatatacatatatatgtacgtacacatacatacatacactgtatacacatggatacacacacacataggaagagatttacatatatgtatacaaaagagagagagagtagagatttattttaagaaattgactcacactattgggaggagtaacaagtcctaaatcttcagagccggccagcaggctggagacccagggaagagttgatgtcttagtcttgattccaagggcagactgtaggcagaattctttcctctttaggggacatctgaggctttttctcttaaggccttcaactgattggatgaagcccaccactatggagagtaatccactttactcaaggtctactgatttttttgtaaattaaaaaaaaaactgtgggtgcatagtatgtgtatatatttatggggtacatgagaggttttgattcaggcatgcaatgtgaaataatcacatcatcaaaaatgaggtatccatcccttcaagcttttatcgtttgtgttacagacaatccaattatacttttttggttattttagtttttaaaagtatttgattatttatttatttatttatttttgagacagagtctcactctgtcacccaggcaggagtgcagtggcatgatctcggctcactgcaacctccgcctcccaggttcaagcaattttcctgcctcagtctcctgagtagctaggactacaggcacctgccaccacacctggctaatttttttgtatttttagtagagacgggtttcatcatgttggccaggctagtcttgatatcctgacctcgtgatctgcccgccttggtctcccaaagtgccgggattacaggtgtcagcaactgcgcctggcctctcttttggttatttaaaagtgtacaattaaattatgattattattattatttttgagatggattcttgttctgtcacccaggctggagtgcagtggcgtgatcttggcttactgcaaacctccgcctgttgggttcaagcaattatcttgcctcgggtgtacactgccacacacggctaacttatgtatttttaatagagatagggtttcaccatgttggctagactggtcttgacctcttgacctcaagtgatccactcacttcagcctcccagagtgctggaattacaggcacgagccaccacacctggccccagttaaattattattgactatagtcaccctgttgtgctatcaaatagtaggtcttattcattcttctttttttttttttttttgtgacagagttgcccaggctggaatgcagtggtgcaatcttggctcactgcaacctctgcctcccgggcttaagcgattctcctgcctcagccttctgagtcgctgggactacaggtgtgtgccaccacgcccggctaatttatgtatttttagtagagatggggtttcaccatgttggccaggctggtttcgaactcctgacctcaagtgacccacctgcctcagcttcccaaagtgttggaattacaggcatgagccaccacacctggccccagttaaattattattcactggagtcactttgttgtgctatcaaatagttttctaactattttttttgtacccattaaccaccctcccaatttccccccaaccctgccactacccttcccagcctttggtaaccatccttctactctctatgtccatgaattcaattgtagggtctactgatttaaaggctaatcacatttagacactcaggagcaagaataattttagtaattgaactaggattctgccatatgacctccaacatcattagcacctgtgtaaattgtatcataaaataattatggaactattatggaaatgtccctctctcccagatcccaccttgtaccaaaatgcaaggtacaaccccgggaattctgagctccatcctagtcttaccctgtgctaattcagtctgggtcatttcttgaattttctggtaaattctcctttctaccctttctaactatatgtatttgtcaggttaagctagaagtgttaatttttttttttttgagatggagccttgctttgtcacctaggctgaagtgcagtggcatgatctcagctcactgcaagctccgcctcccgggttcatgccattctcctgcctcagcctcctgagtagctgggactacaggcacccgccaccatgcttggctaattttttgaattcttagtagagacggggtttcaccatgttagccaggatggtctcgatctcctgacctcgtgatccacccgcctcggccccctaaagtgctgggattacaggcgtgagccactgagcccggacgaaatgttaatttgttttttttgagacggagtctcactctgtcatccaagctggagtgcagtggcatgatcttggcttgttgcaacctctgcctctctggttcaagtgattttcctgcctcagcctccagcatgactgggattacaggcccgcaccaccatgcccagctaatttttgtattttttaatagagatggggtttcaccatgttggccaggctggtcttcaactcctgatctcaagtaatctgcctgccttggcctcccaaagtcctgggattacaggcatgagccacggagcccagcctagaaatgttaatttctaacgcatgtcagattccatgcacactgggcaaggttccattcctccatggggtgactcagggatccaggccaattgcatattgagactctttcatattatcctgtggccttcaaagtcgtcacctctagggatgagaaacaaaagggacaagccagctggtagggtcttggacaagaagaaagacatcacttctgctcacattctcttttgacaaaactcagtcacatggtcccaatatatcttcgaggtggctgagtaatgttatcttcctatgtgtcaagcagaggaaataatgtagtgaagacacaggatggtctctgaaatatcatctcaggcatgaaagtagagcatattcacttgagtgagcctccagtggtgtgaagttgatggcaggagaaagagctggggaagaaaaggccagtggcaggtctcccctcctagccctatgcagccccacagtgggacccttgcatggacctcaaccatcagaatcttttcttttgcaggtcgttactctctgacctatatctacactgggctgtccaagcatgttgaagacgtccccgcgtttcaggcccttggctcactcaatgacctccagttctttagatacaacagtaaagacaggaagtctcagcccatgggactctggagacaggtggaaggaatggaggattggaagcaggacagccaacttcagaaggccagggaggacatctttatggagaccctgaaagacatcgtggagtattacaacgacagtaacggtcagtgaataacagaccacaggggtggaaggtctaacccaagaggcagcccccccagtgtgagtggcaagggatcagcaggatggaaatagtcccaatcccaggggaagaacaggagacacagcagaaacacagacatgtccacatcccacccaccccacagcacaggtgctccccgcttccccatcaattgccccatcctcatcccaggcctcaggtcacacaggaagtgatggcagagtcacttcctatccaggcacctatgacctctcacctccacaccccacccatcggaggctgatacccccgtgagaaggcatcagactcacccctgtccagggaggttgcctggagagtgagccactctcaaagtcactcagacctgggctcacctggtggttctgccagtcctagctgttgacagtgaaacgttcccaaaatatctggttgaaatctgcaaacattggagcactgagacctacctccaaacaagtctgtaatatttaactatgtctgttctatgaaggatgtcacagtctgtcctgatctcccttgcagctccatcacctagcacagggtacagccaatattggctcaattgaaatttgtggaatcaacagagaaaagcacccagcacacaccgtagcccatgctgggggctcaggaagtgctggattcaaaactgtgggctgttagagttccttggagccctaaagttcctccttaccatacgatgcagacccaggaagggccacctgcgctatggtcagaggagctggtggcagagcccgtgcagagatggtccctgtgcccccggcccagtgctctttctcctaaaccacactgccagccccaaggcagccaacctcaggtctggtgaactgctggtgttaaattatcatagagtgggtgtcaaaagatgggctactaagtacaaaaatgcccaaggtgctacatgggatctgaagattttcaaaaggaggcaagaaagagataggcagatgtttcaaggatgtggggtgggggaggtcttggtaaggaaaatggcccaggctgtgtgtcagcaataggagaggagggggcacaggtgatcagaaaagacactgggggaagcattgatggacaggaatagaaatggcaaagtggataattaagaggaaggaggatgaggagatgaacacagggtattagaaaataatagaaggcagggcttggtggctcactcttgtaatcccagcactttgggaggctgaggcaggcagatcacctaaggtcaggagttcgagaccagcccggccaacatggtgaaaccctgtctctactaataatacaaaaatagcctggcatggtggcacacgtctgtggtcccagctactcaggaggctgaggcaggagaattgcttgaacccaggaggcagaggttacagtgagccaaaatcctaccattgcactacagcctgggtgacaagagtgaaacgttgtctaaaaacaaaaaacaaaaaacaaaaaaaggaaataatagtagctgacatttactgagcacttactttgtgccaggcccatctatgagcatatataatgctcagaatagccccctaaaacagtgctcttggcattgccatttcagaggtgaggaaatagaggcacagggagttgagtggctccagttcaggcaacacaccaggtgggggtggggggctggggagagacctgggacgtgagcccagacagcttgagagctttcagagtctatgccaacagcaccaaccagtgctgggtaaacacctgcttttatcatcagaacaaagaggctgtgtcccctgccctatgaggtccatttctgagagttgtggctaatgggcaagaaggttggggctttagagatttgggataaagatatcaaacaccagaaaggtagaaagaagtgatcagattagggttacttaggtgatgatatgaactcttcctagaactgagagaaaaagagagccttcctttactcatatgaaatcacaaataatttctatccaatttggaagtacactttggtgtagttgtgacagcttcctcaggactcagcataaattcaaacaaataattgtccttagaagagatgctatagaagagatagaaatatattcatattctgtagcttttttttttttgagatggagttttgctcttgtcacccaagctggagtgcagtgatgcaatctcagctcactgcaaactttgcctcctgggttcaagggattctcctgcctcagcctcccgataactgggactacaggctacaggcatgtgtcactactcctggttaattttttttttttttttaagactgagtcttgctctgtctttcaggctgatgtacaatggctccatctcggctcactacaacttctgtcccccaggttcaagcgattctcctgcctcagcctcatgagtagctgggattacaggcatgtgccagcacacccagcaaatttttgtatttttagtagagatgaggtcttaccatgttggccaggctggtctcaaactcctgacctcaggtgatcctttggcctcagcctccctaactgctgggattacaggcatgagccactgcgtccagcctaattttatatttttggtagagatggggtttcaccatattggccaggctggtctcgaactcatgacctaaggtgatccatcctcctcagcctctcaaagtgctgggattacaagtgtgagccactgggcctggtgcttttttttttttttttttttttttttttgagatagggtctcactctgtcacccaggctgaaatgcagtagtgtgattttggctcattgcagccttgacttcccaggctgaagtgatcctcccacctcagcctcctgagtagctggggctacaggcatgcaccaccatgctgcgctaatttttatattttttgtagtggtgggatttcgccatatcaccctggctggtctggaacccctgggctcaagcgatccactcgcttcagcttctcaaagtgctgggattacaggcatgagccacagcgcccaggctgtagctctcttaaggaggaacatatctcatctgagacaaacctgaaatgccaaaccaaactgagttagcccctctctgtctgttgtatatattggagtaataacctatttgtcttgataaagggattgcatgcttgaattgcaaaaacctttatttcttttgggttgcccaatgtgcaagactaagagttattttgataaatttctcaccaggctgactgtctctctgtggggtcgggggagttttcagggtctcacgtattgcagggaaggtttggttgtgagatcgagaataacagaagcagcggagcattctggaaatattactatgatggaaaggactacattgaattcaacaaagaaatcccagcctgggtccccttcgacccagcagcccagataaccaagcagaagtgggaggcagaaccagtctacgtgcagcgggccaaggcttacctggaggaggagtgccctgcgactctgcggaaatacctgaaatacagcaaaaatatcctggaccggcaaggtactcactgcttcctgctccccagtactgagcccagaataaaagacgatctcaggctaggagctcaggcaacatcttagtccggtctcatctgttcctggatgtccctcagacccccagctttcatcttttaggatttattccttccctgggataatataatttgtggtccaaaaagaacatcatcaaaatttcaggcagaatgggccaggaaggccattctttcttgatgagtgtccccaaatcatctccaattaacagacaaggagcttgaggttagggaggtgagggtaacactgtctgtaagaggcagagctgggactcaaattccagatttcagattccaaatcccatcgttttttatctctacaatgatgcctcccatctgggtggtggagagaagggaggcgtgtaaaatgtcagccccagaaggacaagagcaagccagtgtgagcggaattgatggctgcaagctgagacttggattggagacgtagtgagactcaggattgtgcagtgctgcagggaagtggttgctggatagaggcatgggctgaaccaagcagctggactgagactgggggacagaactccaaagcccactgagatgtgggaaaacatggagaagcacacggagcattcacaacttattgccgtcagagtcaatacatgggtgaggtggggattgggcaagagggaaagcgtcagccttccctgatattctggaaagtctcccggggctgggggtgggcaggtacagagcttcgagctctgctgatcgctgacatccaggggtgggggtaggaagagacctgggccgggagaagtccacctcaagcctgcagtgtcacactctatccctccacagatcctccctctgtggtggtcaccagccaccaggccccaggagaaaagaagaaactgaagtgcctggcctacgacttctacccagggaaaattgatgtgcactggactcgggccggcgaggtgcaggagcctgagttacggggagatgttcttcacaatggaaatggcacttaccagtcctgggtggtggtggcagtgcccccgcaggacacagccccctactcctgccacgtgcagcacagcagcctggcccagcccctcgtggtgccctgggaggccagctaggaagcaagggttggaggcaatgtgggatctcagacccagtagctgcccttcctgcctgatgtgggagctgaaccacagaaatcacagtcaatggatccacaaggcctgaggagcagtgtggggggacagacaggaggtggatttggagaccgaagactgggatgcctgtcttgagtagacttggacccaaaaaatcatctcaccttgagcccacccccaccccattgtctaatctgtagaagctaataaataatcatccctccttgcctagcataacagagaa

SEQ ID NO: 310 - DNA, 77768 bp, Homo sapiens
ttgtgcaaaaaccctaggtgtgcggacgaaagagagccaggcagaaggttacaacaggtcaggaataaataaccaccaggcggaggatccaagattctgtccttccttttgttggatgaggagcgccaggcaaacgcgtccacaaaggcttcggaaggaagcggctcgcccgcccacacccggctcctgccccgggtgactattaggggccccgggggggtggcagaagcccgagacccaggggatcaactctccccgaaggcctagcagcggggaccccagaataagtcgggggcgggccccggcgcggcaggagggggccgggcgggcgggtgagcagatcccaccccttcctgaaggaagcgccctacccgccgctactgctgccgccgccgccaccgcagcaggtcacagcccctcgaggcgacagcggccccgccgcaccagagcaggtaggcgcggcgccccctcccctgcctgggcccgtcgcgcagccagggggcgtccggcccggccccgtgcgcagcccgcaggcggagaccggggacggcgggggctgcagcgcggctggggcggctgggtccgcccggctgcggggccctgctcggctgcggccccctcccatagcgtcccgggcgcggggccgcccgcccgagccctccgcgggcgcacgctccccggcaagtccaggagtcggtgccggctctgccccgcgacctgcgaacgcccgagccggcgcgcctcggtccccgccgccgcagtgccgccagccagcccgcccgctgcggccccggccccggccccggccccgtcctttgacaggtgtccccacccgccgccccatcatctcgttatcgggtggactcgggtgagaagcgaccccaagtttgacctcccggtccctgtgccattctccctgcactttgcggttagccaggtcaggctggctcgggaagcaggggatctgggaaggaggcactaacttgctttgccctgtgtaccgccctccactctaaatgcacagtcttccttcctttcctgggcgcacacttgggaagaaatgggatttttggtttttcggcgggaggccgtggtaggtgggttacctaggctctttggtaatctgctgcaataaaaaagtgattagctttgggttctggagagagtccttgagtggttttcccctccttaaatgaatcaaatggagtatgagagggttttcccattttaaattcatgctccttttttctctactcattcctttcctccacccctacccccacagcactttatgatgtcccacacatttcactgatctttttggtcaggtttattccggccagaccgcctttcacggttgggccaggattgtgaccgcatgtgggaacatagctcaggtagaatggaagtccatcttcccgagtgaacccactccgatgtcctacatgcgaggtcctgttggggaaccagatataccaatgccatgttgaaaaacaaaaccaaacagttattggatctaaaacaataacaaagcctaaatggcaggatcagtttctgcatctttctctgcttgaaccaaagacattttaatagtgcagggctataactccattctgggcagcagttcatcgaaaggatagttgagtgtggatttataaactccatggtagcagtcattaaactgacctacttaaagtttcctatttcaaggaaaaattgttaggcccatatatgtgaccgatcaaagaattttagtctcagctctcatgtatcaaatcccaaactttttcttgtatgtgttctagagactccatgtttccaggattaactatagctgtcatctattaatgagctagaaatgtgagtttaatcttcaaggcataagcgtaggaattttaatggtgtgtcctttatacattatttaataaatgttttgcaagtcccccaagttggaagctcacaaactggacatggtaaataaaagggtaaagaagttttgctaacaataatgactagttgatagatgttatgacattcacaaatatattaaagtatttgaaaaacactttaatgcatgtttattataatctgccattagctgaatgcaatctgtttggattatttaaattggcatttaagtcttcagagcaattgcttaattcatgcatttcttacaaataccttttccatgttgctttgtggggggataatttgctctatggagtaatttttttttttgcgtgaacacaataatgcgttctatttagcctttgttgtagaactaccacaatcatgttcacaatgaccttgcaggggtttttgggctcactttatctgctttgcaattgtcaagagagaaggccctttgctttacactcttgtctgtcttcctgctttgtctcgcctgtgacccacacctctttagtacagtgggtcagattagcagggcagcctggagtcatgagagaggaaaagctagctggaccccgcaatctcagccatttggtttcactgcaatctggccatttgggatcagttcagtaaccaattaagcaagacaagcactgacaagataatgtattacttctcagtcatcccctttcacagaagaatctgtaacacttagaatcagcactacggtgtgattaggttctggtaagggtccaatgagatgtgtgctgaagttcccaaaacattatagggtccaagtgttattgaatccaggtctaagttcatgaaaagcgtaggactagacacaggtgtgtaataagtgtgtccctactttttttgtttgtttgtttttgaggcggagtctcactctctcgcccaggctggagtgcagtggcacaatctcagctcactgcaacctccgcctcttgggttcaagcgattctcctgcctcagtctcccaagtagctgggattacaggcgtccaccagcatgcctggctaatttttttttttttttgtatttttagtagagacggggttttaccatgttgatcaggctggtcttgaattcttgacctcaattgagccacccgcctcggcctcccaaagtgctgggaatacagccaggagccactgtgcccagcccctgtcacatgggtccgtgtgaagagagtccaccaacaggctttgtgtgagcaacaaggctgtttatttcacctgggtgcatgtgggctgagtccgaaaaaggagtcagcaaagggtggtgggattatcattagtttttgtaggttttgggataggcggtggagttaggagcaatgttttgcaggcagggggtggatctcacaaagtacattctcaagggtggggagaattaacaaagaacatttttaggggtggggaaattacaaagaaccttcttaagggtgggggagattacaaagtacattgatcagttagggtggggaagaaacaaatcacaatgatggaatgtcatcagttaaggctattttcacttttgtggatcttcagttgcttcaggccatctggatgtatacgtgcaggtcacaggggatatgatggcttagcttgggctcagaagcctgacagcccctacttattttaactataaatttttactcctggagctgatggtgccatgtagctttatattttttcatagttgttctaagtattttaaaacttgttcataaattattggaactttaagttattgttatcaccaaatatcatttcctggtatgtttagatttttttttttttctggtatgtttagattttgaaagacaacttgtggcaatggaaaatcaatcatcatgcaaagagattttagatcagccatttagaatattttgagataatcgtgaaatctttggcagtagccttcaaattcagccccaaactattctgagtcaaaccagctttggtaggtagggcttgaagctcttttactaagtgagaaattaatattttcctttttggcatctataaacagccttttctagatcagtgctgtccaaaagaactttctgcattgatggacatgttctgtaatctgtccagtatgataaccatgagccacatgtggctattgaacgcttgaaatgtgggctagtgtaattgaggaactgaattttaaattttatttagccgtaattaatttaaatagccacatgaggctagtggctaccatattggacagtatagttctgaattttctccccatatttcctagagagatagcatttaaaggcaattatcctttaattagaaaaaaaaaagtggcaattggcattgataataccagaattgagatttgacttcataatcctattgctatgaaaaaccacttgtgaggccacgtgcagtgtctcacgcttgtaatcccagcacttcgggaggctgaggcgggtggatcatgaagtcaggagtttgagaccagcccggccaatacagtgaaaccctgtgtccactaaaaatacaaaaaaaaattagctgcgcatggtggcaggtacctgtaatcccagggagggtgagacaggagaatcgcttggtcccgggagaggcagaggttgcagtgagccaagatcgtgccactgcactccagcctgggcgacagagctagactccatatcaaaaaaaaaaaaaaaaagaaaaagaaaagaaaaaccacttgtacttgctctgaagaagatattttgtgctgaagttcaaccctactctaaaaactgtttctctttttaatttctatgtgtctgctagcctcaataataagcatcacccagagttgtttagatgcctggcccctcgtgtcggtgttcatgaacttgggcttatttgctcttttgcacattacagatcatgtattcttagagtcagtttctgtacgtttcaatttttcaagggagaggaggttcagagaaaggtaggaagtaggtagtgatgcacaactctcgcactcttcccttgattacaatcacagagaccctgtgaaaagtctgacaaatgggtacccctggctccaggagcagctgaagcctctgcctctgttggtttctgcccttcttgtctggtttctttctcttaggtttcaaacccagatcctcttgctcaagtctagcctgtggagattaccaaatccacttaaggtgtaacctaccattatttttagtaaagccattaaaatgggatttgatttagcatcaagcatgttgtttccatttttaaactaatttgctttgattaaacccattattttgatcatggagagggacatgttgttaattagactgttttacaagacactgcctctcatgtttcttgggtgagtgatgctcccgcacccagcataggcatctagggtacttctctccaggccagagctcagggtcctgggggttcccctcctctggaagggactcttcctcaatcaattatttaaaaatttattgactatgtttgtgcctactaattataggttgaaataactcccaaattatctctgtgttgaagatattaacaccccctgataacatttcccaaattagtgtccatcccatagggtgatggggatgcttgaataaatgctccatataatcttttttattatttttttttggagatttataatgcacaatagcatggtaaagcctctaagatgagatacatatacttatttaactttttattgttattgttttctgttcttttcttttctcttttaatagagacagagtctcactcactctgtcacccagaatgctcagtgcattcttgaactcctgtcctcaagggatccgcccacctcagccccccaagtagctggaactacaggcgtgtgccaccatgcctggctgttagtgttttcaaaacaatttttcttacaacacttactgtagtatttttcaaattacatgtcttgggtcataaaatcaattgagcaggttaggatcagcatttttcttgatgaaataaaatgtctaatagaagtggtcactgtgcatcctttttattgacggttactagtgtttgatgaaactttggctcctccatgtataacaagtaccaggccacaaggcagtggagagtagtggttcagagcactagagagtctgggcacgttggctcacgcctgtaatcccaacactctgggaggccaaggcgggtggatcactcgaggtcaggagttcaagaccagcctggccaacatggcaaaaccccgtctctactaaaaatacaaaattagccgggtgtggtgatgtgtgcctgtaatcccccctccaagaaaaaaaaaaacaacactagaaaaacaggaccccggacccctaggttcaaatcctaactctgcaccactcagtccatatgtaataagcagcatatatgcatatttattatttgcattattgttacataagtgtatatgtgtataccggttcatgatgtaaaatattgcctatgaaactaggcttgggatccacttgaggaaacactgtcctaagacaaaaataatagctaatagtgagtaacattattgagtgcttaacaagtcctccagctgaatgctttgcatcttatcttgtctctcacaacagtcctttggtgtaggtattgccattatcccgcagtacctacatcccagtaagtagtgaaggcagaataggaacccacgcaatctggtgacagcccaagcgttcaaccacctcacctcccatcttacaatgtgatagcgatacatagatgtacatctacaaaactgtgaggctcaaaaattgtagagcattgtacaagtgcggaaataagctgatgccagttattttctgtgtaagaggaggcctgatgggtgataggggaatcattgcacatttaggcaggaagagacctcactgctgccagcctgtggtctctgaaggttaacgcccttgaaaaaacagctatatgcccaaagaaatatgcttgtcccagagactgactacagattttgtctccagagctgtcttccttccctcctaaccacttcctaacttctgcacacatttgtttttagcagatagtgacaaatggtctcagtggatatgtctgtcttataaatctaccactatttactacatcctaagttatttgtcttttcaaaatcacctcctgcccacaagtgcctcgtgacatagttttaataaaataaatagaaaacaatgttgttttaagaatttcatatgacaaaagaagtcttgaaagtgaggctggaaatattttttctccagtgcaatctagaaagtaaaactaatttcattttggaagtagatttcagttttccttaaaggtcaaacttaatgtaatcggatcacttaaagtccatagactttgtcaggtagactagaagaggcaacagcttgccatcatgcttactttcctttaaaaagtacagaagctgtgtctaacgtgaaaaattctaaagctattcagattttgttcaaggctgtagaatcttccatctctgaggacagtgatccagactctatctgtggaataaaaaggggcaagatgaactgcctttgagaaaacattgaaagtggggtaatacttttagacaggtgtagacaaagcttaagaagtaactatgcttaactatggcggtataggaaattagcccatactttaaatgatattatttaactttgaagcaattataatgaattataatgacaatcaactgaatataaacataaatgtctctaaaaatagcatagctttactattcaccaaacatttcatttattaacaaagtagatttcgtactctttttttacacttatgatgacttgactgccaaagaaatatttaaatggcaataattagaagttttaaagcataaattaaaactgtatgtagctaaaattaacatatattttttaaactgtgctggttgataaaatagtctttcaagttattttcattctgttgattcatgagtgaatagtgttaattaagaaatgttgataccattgtaatgcaatcccaatagaaatagtatttttttactgaacttggagtatttgcaaattaaaattagaattctgtaatataatcatcctggaatttctaatggaaatatatctcctggaatttctaaattctagtttgcactgaaacttaaagtatatttatatagaaacactgataactaaaatatacctacatgtagtagcaggaatattaacttgtgggtgacattttttctgcctttgtggtattatgttcccacataccatagacttcaaaagtatggcattttgaaacattttccagtcttgtcattgacagcacagtattcacaaaaaccatatttatctcctgtaattttagcagctaatagaattgttcttgaggaagctgattatcttttctgtgacattttgattggtgtttccccattttaatttcagcttatatgtggcataaaattgatttatatgaaaaggagtggcttgccattttataacaaaattttgattgtatatgtatgcacataaaaataaagatgaaaattctccattaactgattcgcagaatgatacagttatgatcaaatagtggcatatcgtgatcttttaagatcaagccactgacccaaatcagtgttcacttacagaatcataaatgtagcaattcagaaatgttgctttttattagctattggacaatatttgtgaagtccctagcacagtccttggctcagagtgactttttttcactcttctttcttgttcataacacaagttctaacttattttatcgaaatgggaaattaaagaggattttctggatgataactgctcccctgttcagtgtctcagagccagaaaatgcctttggaaggcacgcaatttatttcttagagtcttggcttgaccatagccatcacagaaggatgagactccattccactttggcctatgaatattttatattagttctcaacatattgtttgtccaagccaacttaacatgactctgatgttgtaccttaaggcttacttcggtttcatccggcttctagtttgtttgcttgttgcatatttaccttgcctttccaaataaatcattatctctttgtgtttagaaattatattaagtaaatgtttttgtcttagggcatttgatgttttttcgataggagtcagctattttgtaaataaagtccaattggtacacagccatacccattgtttacatgttacctgtgactgcctctacatgaacactgaagagttgagtaactggaacagagaccaggtggcccataaaggtgacaatgcactggctagcctgttattgactgaatttttaattttgattaattcaaattttaatagcctctgtggctactggacagcagtttcagatggaacacaaaggtgttctttcctccaggccagttaactaatgtgatctggcttcttgtgctgccctaagatgcagcacccttccactgggttcttcagacagaccattgacctttgcccatggctggcctgggcagaccctggactgaagaagttcttaatgagttgctactttagacagcaccacaagcccagaagagatggcaagcgaggcagggggcagaggttctcaaccatggctgcacaaaaaatcatctgacgaactctacaattccagcggcaccccaaatctattaaatcagaatctctgggtgggtcggggagctcagacaccaaacttttttttaaaagcttcccagatgatttcattgtgctctactggctaggcaacatcacaggtgagctaggtagcctgtgtacttcagaattccaccaggtcatcacaggcaagcttatgggcagatgggcagggaaatggacacatgaaggccagtggacacctagcttagcttaacaggaaagctctggtggggactgagctgttttcccacctggtttctctagcaccagggcccatttgctcagtagggccaaagtgtagatttgtgtgtgacagaggtgagcttcaaagaaggaaaaatgcaggatcttccaactcacacatccagtgctttctacttatgtattcaaaaacatttatagagcacattttaatacatttttgtgttgctataaaggaatacccgagggtagtgggtaatttataaagaaaagaggtttatttggctcctagttttgcaggctgtacgagaagcatggtgccaacatctggttctggtgcaggcttcaggctgtttccactcatggtggaaggtgtgggggagccagtgtgtgcagaaatcacatgccgagagaggaggcaaccagagagaagggagggaggggacagcctctttttaacaaccagctttcttgggagctcatagagtgaaaacttgctactgtgaggttgctaccaagacatttatgaaggatcagccccattacctaaacccctcccattagtccccaccgctaacattgggtatcaaatttcaacataaggtttggagggatcaaatatccaaactataccagagtgcctactgcatgtttaagatatgccacacttattcagtctagtggggtgactgccatgtaaacagttaccatacagtggggtaagcatgctaattgagaggcatcctagggtaccataagaacatgaggggcagccgccctggatagataaggggagagacatcaggtggtgctttccagagatggtgacacccaagctgagtcttataggatcaaaaagagtagtcacgtgaaaaggggaaaatgaaaaaaagcagatacacactgggatgaggccctggctgacttttctgtccctaagtctgaacactataagatagctccttcctgaggaagactctccctgctattttagcaaacctcatggaatgtccttattttaactgacctttaccatttactcattcactcattcattcaaatatgatttattgaagcattgctatgtgtagccataatctaggtattggtgatagagcactgaacaaaatggacatttctgtcctcagggagctttacattatagtggggaggacagaccgtagataaataaatagtatagtgtatgctgtatgtgctatggagaaaaaaaatcatggtaaagaatttgggggtgctggagaatgttttctaagaactacaagtctcattgctgaatgaggcaacccccttccaccctttgtcatcccaactcttcattcaattcccagtcactcctgtttatttcttaaagaactgacaatctggctccatgtcttcctgtacctccctttctcccccaactcttgcagtaacttatggcaatgacatcatcctagagggtctgaccgatgaattcagcctcaaactccattggaccttcttagcatcttcacctccactaaaccatacctactcactctcaagccttcacccaaactcttgtctggctgctattttttcacctcagaaatcttaaccccactatcccattctctgaacataactgtgcatcctttgaacataactgtgcatcctgccagctcttcctttctttctttctttctttttttttttttgagacggagtctcgctctgtcgcccaggctggagtgcagtggtgcgatctcggctcactgcaagctccgcctcctgggttcacgccattctcctggcttagcctctctgagttgctgggactaccggtgcccgccaccatgcctggctaatttttttgtacttttagtagaaacagggtttcaccgtggtcttgatctcctgacctcgtgatccgcccacctcggcctcccaaagtgctgggattacaagcatgagccatcgtgcctggctccttccagctctttcataccctactcctcaatctattttttcattgagacctctagtctcttgacttcccacagttgcccaaactctttcttatatatccatctgtatctctgttttcacagtgctataaagaacggcccaagagtgggtaatttatcaaggaaacttctgcatggctagggaggcctcagcaaacttaaaatcatggcagaaggggaagcaggcacgtcttacatggctgcaggtgagagagagagagagttcatgagagttcatgagagagagcatgtgaaggtggaactgttaaacacttataaaaccatcagatcttgtgagaactcactcactaccatgagaacagcatggggaaactgccctcttgatctagtcacctcccaccaggcccctccctcaacacatggggattatggggattacagttctaggtgagatttgggtggggacacagagccaaaccatatcaacctcctttcctcagaggatatgatgtccatttttctttgtgtttaagactagcacatcacctgaacccctaatgccatctcctctcacctcctttgggtccagggtttttgctctattattatattcctctcttctgtggtcctgtacctctctctgctctttgctagctccttcccatcagacaagcatttgcaaatttcttacattctaaaaaataattctcctgggttaaataaattaaggtcgatctctacaatagaatactatacagtcctctgaaatgttgacggagttgtatatatctccaataaagagatgattacaaaaagaagtgaaaaagtttaaagagctttgttaagtgatttcctttttaaattttaattacttacatgtttaatccttacttgtggtaaaatccacataatggaattgaccaccttcactatttttaagtgtacagttccgtagtcccaagtatattaacattgctgtacatccaatctccaaaacttctttcgtcttacagaactgaaactctatacccattaaacaactccccatatcctcctacccctagcccctgacaaccattattctacttttctctatgaatttaatttctctagatacctcatataagtggaatcatatggtatagtatttgtctttttgtggctggcttatttcacctagcgtaatgtcctcatgattcatccatgttgtagtacgtgtcatcatttccttcctttttaaggctgaataatattccatagtatatataccacatttcaaatcattttatttttgaagaaaaatatttttgttagtatatgtaagtgtatatattcatatgaatatattacatgcaaacatgcacacatatatatatatttgtgcaaaagattgcacatcaaatgtaacagtggttatctctgaattggggatttttttttttagtacttctcatcttcttctttatcaccatctctgccttctgaagtatttccaatgaacacatttccctatagcgaaagccaaatcattggctgcaatgccattacccccaggatggggcacttgcccacctctctggctcacctatcaccactctctgacttactcatgattccctaagcatcacaaactctgtttcctgcacacacaagtggttgggagccttgcagccctgtccatgccctgacatctgcatgcagtgcctcctcaccagcttaaagccttcacatccctgaagacccagcccagggccattacctcctcgcttgcccaccacctgccccagtgctgggttagtttcctctctttggagctccctggtttcctgtaccaatttccagctgctgcacttatttcctaattaattatctatgaattgcatgggagtgggactgtgtcttcatattcactccatctagcacagagcccagccagcaagctcagcaatttggggagccacttttggttcagagggactggactgcagcatgctcagaaaggcaatgggaaaggagatggtagacttgccctgggacccttcattccacaacaccctgctgccccttgcacgaacaatgtaaagatttttaaatatattacattttattaaaaataaatgagatgttattgaaaataaatttgatatttaagtgattgaaaaactatgttttaattttttaagtaatttcagctgtttaggaggtacatgtccaagtttgttacctaaatatattgcatgatactgaagtttgggatacaattgttctcatcacccaggtactgagcatagtacccaatagttagtttttcagtcctttctgtcctccctcccctctctggtagtcctcatctttatgtccatgagtacccattgtttagctcccacttatgagaacgtacggtatttgtttttctgtttctgcattaattcactgaggataatggcctctagctgtatccatgttgttgcaaaggacatgatttcattcttttttatggctgtatagtattccgtggtgtatatgtaccacattttcttggaccagttccccattgatgggtacctaggttgattccatgtctttgctattgtgaatagagctgtgatgaacatatgagtgcatgtgtctttttggtagaatgatatattttcttttggctatatatccagtaagaggactgctgggttgaatggtagttctgtttcaagttctttgaactgctccaaactgctttccactgtgactggactaatttatattcccaccaacagttcctaagcattcccttttctctgcagccttgccaacatctgttgttttttgacattttaataatagccattctgactggtgggagatggtatcacattgtggttttgatttgcatttctctggtgattaaaccttttttttcttttttttttatttttgagacagtcttgctgcgatgcccaggttggagtgcaatggtgcaatctcagctccctgcaacctccgcctcctgggttcaagctattctcctgccccagtctcccaagtagctgggactacaggcgtgtgccaccatgcccggctgatttttgtatttttagtagagatggggtttcaccatattggccagactggtctcgaactcctgacctcaaatgatccgcccaccttgtcctcccaaagtgctggtattacaggcatgagccactgcgcccagctgattaaaccttttttttttttcatgtttgttggctgcttgtatgtctttttttgagacgtgtgtgttcatgtcttttgctcattttttatttgggttatttgttttttgcttgtttaattgtttcttataaattctggatattagaccttagttacgtgcatagtttaccaacattttcttctcccattctgtaggttgtctgtttactctgttgatagttcctttgctgtgcagaaactctttagcttaattaggtcccacttctcaatttttatttttgttgcaattgcttttgagaactaagtcataaattcttttcccaaggttgatgtcctgaatggtgtttcctaggttttcttctaggattcttatagtttgaaaccttacatttaaatatttaatccatcttgagttaatttttgtatatggtgaaaggtagaagtccagttttatttattttattttatttatttatttttgagacagagtctcactctgttgcccaggctagagtgcagtggcgcgatcttggctcactgcaacctccacctcccgggtcacaccattctcctgcctcagcctcccaagtagctgggactacaggcacccactaccatgcctggctaattttttgtatttttagtagagacggggtttcactgtgttagccaagatggtctcgatctcctggcctcgtaatctgcccgcctcggcctcccaaagtgctgggattacagacgtgagccaccacgcccggccccagttttatttttctgcataaggctagccagctatcccagcagcatttactgagtagggagtcctttccccattgcctattttttgtcaattttgtcaaagatcaggtggctgcaggtgtgtggcattaattctgtgtttattctgttccactagtctgtctgtttttgtaccagtactatgctgttttggttactgtaaccttatagtatagtctgaagttgggtaatgtgatacctctggttttgttctttatgcttaggattgctttggttattccagctcttgtttagttccatgtgaattttagaataggttttttctagttctgtgggaaatgacattggtagtttgataggaatagtgttgaatttgtagattgttttaggaagaacagccattttaataatattgattcttccaatctgtgagcatagaatgttttccatggttgtgtcatctgtaatttctttcagcagtattttgtagttctccttatagagatcgtttacctccttggttagatatattcctagattttttgttttattttgttttttgcagctattgtaaatgggattgtgttcttgatttggctcttagcttttttttttgtttttttgagacagagtctccctctgtcatccaggctggagcgcaatggtgcaatctcagctcactgcaacctccgcctcctgggttccagcaattctcatgcctcaacctcccgagtagttgggagctgtgcaccaccatgtccagctaatttttgtatttttagtagagacagggttttgccatgttggccaggctgttctcaaactcctggccttaagtgatttgccagcctcagcctcccaaagtgctgggattacaggtgtcagccactgtacctggccaagtttataggattttctaagtatagattcataccacccacaaagagagatagtttgactttttcttttcctatttattattttctttctcttgcctgattactgtggcaaggatttccagtactatgtcaaataggagtggtaagagtgggcatccttgtcttgctccagttctcaaggggaacgcttccaggttttgcccattcagtataatgttggctgtgggtttgtcctagatggctcttattattttgaggtatgttccttcaatgcctagcttctttatttttatcatgaaagaatgttggattgtattgaaagcttttaccacatctattgagatgatgatatggtttttgtttttaattctgtttatgttatgaatcacatttactgatttgcatatgttgaaccagccttgcatcccagaagtgaagcctatgcgatcacggggaattaactttttgatgtgctgctggattcgatttgctagtattttgttgaggacttttgtgtctatgttcatcagggatattggcctgtagttttctttttttgttacatctttaccagattttgttatcaaggtgatgctggcttcataaaatgagttagggaggagtccctcctccttgattttttgactagttccagtagaattggtaccagctcttccttgtacatctggtagaatttggctgtgaatacatctggtcttttttcattggtagatttttggggcttttttcatttgtagatttttttaaattactgcttaaatttcagaacttgatattggtctgtccagagtttcattttctgattcaatcttggaagactgaaaaacaaatgctacatttcagtttttttttgcatagtcttactctgtcacccaggctggaatatagtggtgcaaacatggctcactgcagcctctacctgcctggctcaagccatcctcctacctcagtctcccaagtagctgggaccacaggtgtgcacctccacacttggctaatttttgtattttttgtgcaaacaaggttttgccatgttgcccaggctggtctcgaacccctgggctcaaggaatccacctgcctgggcctcccaaagtgctgggattacaggcatgagccactgtgctcggccatacattttgatcttaatgatactggtcaactctggcgcctatgctgggtcaggtgggcagggccttctgttgtgttgggcccatcaggcatgttcaataaatacctgttaacttccttaataaccctgctagttccctgttatcaaacttctcttccttaaattcatccactttgacaggctgggacaagagttctttaacagcaaaggaggcctctattatcaccctccaagtcatgcgatagtgactagctgctcacactacatgtatgattgaccttgaacaggacccttatgggaaataaaaacaaatcaaaagatctgctaccgacatggcaccctagggtgtttaagcaccttagtaggtgaaaacttaatgaatatttactgcacttgatgttgccagctacacctggacggtgaggggcagttaatatccgatcgttcgtaatagtggttcacactgacaagctcagaaaggccatcaaaatttggtaaaacaaatcttgcaaaatgatatagttaggtagtttggggaaattttcttatgtatcaaaggaggatctgtaggcctcccttaggggacattgaagggacagaaggaaaaatgaaagacagttttaattactgtggaaatgaactgattggagtggtcttcagcttctcggcccacaagggtttctcttgatttttccttgagagaattggccctatgtgaatggtttattccagagcatctgaaataattttaggaaaaatattgattgatgacaggacatttcatgtttgaaatgatacattgtttagctcttgaatgagtatgttgtatatgggcataggtaacctgtgctatttgcatcagagtcacagcctcttcattcaatgttgtcttcatccaagatcaggcccttttgtagaaatctggctagactagttagttctggtttttatattgttgttttctttcatttttttctagtaggctagaaaaagtagtaacagcgttacttggaataagcattagacttgcagatgtaatatcagcattcaagtcctggcctaatcacctgctatattggctgtatgcttggataagttatttattttagcttaggtttccatttttcagcagtaaaatgtggatatacttgtctgtctggatctctaaactgtatgtggttgaaagtaggggtcatggctcatccaccactggaaactcaatatatgggatagatccttgcaagtaagaactctgtaaatatttgttgaacaagtaagattgatcttaaagaggaagtagaatgagaagcagcagagtgtagtgttaagagcacaggtcctggagttagaccccctgggcccaatcctggttccagtattcccagcaacgtgatgttggacaggttattacttttgtgcatctgtaaaagtggatgctagtacctacctcctagggttgttgtattagttgtgccaggcacatagtaagtgctatatacataacagtcattaatacagtgcatgaaacattttgcaaagtgctattcacataaaggtaatatgtattccatgaggtcttgctcatggaaggtcttcacaccgtgaagtactttcagtactgtgtctttcccggtcttaactagtggtaattcctttcagtttcacattttcttcggtccagctagtgtgtctttcacctggatccatttaatgacactggcaatcaccttgatgcaaatataaggttccaagaaggactgagcttgaactgacctgcctggaactcttctacctactctcttcttccaccacttgctatttagaaataagtctgagaactcccatgcattacaaatttttaagacaatgttaaataaccatggtttgatgtgtgaaaaccctgtactagtttccacactggtttccctacctcctgccttttggccaccggaatctcatgagtaggtcctgcttacctcatcttccctgcacttcactttcacaaggtctccctgcatcccagagccctcttgagtgactacttatttataggaccaaatccaagctacagggattggcattcaaggccacatataatctgaacccattttatttgtccacatttttcttccagttcctcgcttatgtagacttttactgcccactgatctgaaccctgtcctgtcttcttctgttttcatggttcccacattgaaatgccctccctggcccattctatttatttacatttgtccacagctttaagacccacttattccataaaccttaccttttcctaaatattgactggcttcctcctatattttggcatttggttatatttaattaacagctttattagatgccatttttattagtatcttctcattaaagactcagaccaagttgataatattaaaattattataagctttccagttgggcatttaggaaaactgtccttgttttgtacgtgtaagtaaaaaaataaatcaataacatttttctcttggcagctgtatttctaccttactgcgcattaagtatagccctagagtccagaccatatgcagtaaaacaaaataatattatagagcaaggcagggctgttactattatgggaaccataagtatatatttcttgactttttatgagaaccgtaagtatgtatttcttgactttttagaatacatgagacttgggctgttttagtatatcaacagttcgtcactatttaaccatggatagactattgaattaagagctggaaccccaccgtcatttaagtacatagtgggaattcagtatttaagtacatagtgggaattcaataaatgtgtacaaattgatttgtggcttattttgggctcctcactgatttagtctgatctgtacatttcaagtcatctctttgtactaatttagaatatcatctaatactgaagttttattaaatttaagaaataatgaaataaaatgttgttgctagagtacagacatagtacatccatcattataatcaacatccttttccttttcttttcccctctctgttccttctttttcttctgttttttcacatcaatggttatctgaaatgaggagagcaatgagctaggagctgtatagatgtgtagatgaatgaaacattgcctcctctctctaagaaattacagctgagcatagcagacatacatgtgaacaactatgatctacccatattatgagattgaatcaaatcagggttaaatatttacataagaaaactttggggaaatacagagaaaggaatagaaggatagaaagtatataacttatccttactaaggatttccttgctaaggaaagtatataaatcatccttactaagcttctagtatgtgccaaaccctgcactagataataattatgtgactgcatccccataacaaatatttgaggtaggtacattaatctgcttttcaaaaataaataaattggagtgcactgtgattaaataaattgcttaaattcaaacagctagtagagacagagctgggattcaaatcaacctgtcttagaagaataagttcacaagatctattgtacatcatggtgactagagctaatgacaatacattgtatacttgaaaattgctaagagagtagattttaagtgttctcaccacagaaaaataagtatgtgggataatgcatatattaatttgtttgatttatccattccacagtacatacatatatcaaaacatcatgttgtacaccataaatatatacaacttttatttgtcaattaaaaaatagcacacaacaataaatcaacctgtctttgtgtcaggataaaaatatagtaattatgtaaataaaaacgtttcaatgggtgcttcttttaaataaccacagagctttgcaagggtttgcatttccctagaagaacttagccaggataaaaagcaataagatgcaaaatattaatattaataataataatgcttagatggaaaaaagcaaaacctttttaagaaaacacccttcagttttgaagcttcccaggtagtgaaacactaattaaaagaataggtaatagccaggcgcggttgctcacactgtgttccccgcactttaggaggctgaggtgtggggaggattgcttgaactcaggagtttgagaccagcctgggccacatagtgagaccccatctcaacaaaaacatcaataaattagccgggcatggtggcatgcacctgtagtcccagctactcaggaggctgaaatgggaggatcacttgagcccagaaggttaaggctgcagtgagccatgacaacagagcaagaccttgtctcaaaaaaaaaaaaaaaaaaaaaaaaaaaaaaaaaaaaaaagaataggtagaaacattgaatgactatgacttatttgggcttagacaccaattttatgtgcaggtgtttgcctcaacagttccttcttccagatgaacattagaaacactgtcaaattccaaactaatctccttaagtttttctattgaattctttggtatctctaaatttggcaagagtggttttcttcacagtattctgttaataatttaccttccaggaacatttattcaagtttttgtgtctcttagtagttttgtgggatttgttcatgtacatttcttataggtagtcctcaatattttatgggttttgttgctattgtagatgtttccatttttattctgtatatttaaaagttgtggccaggcacggtggctcacgcctgtaatcccagcactttgggaggcagaagcgggcagatcacgaggtcaggagatcaagaccataccggctaacacggtgaaacaccatctctactaaaaatacaaaaaattagccgggcgtggtggcgggcgcctgtagtcccagctactcgggagtcggaggcaggagaatggcgtgaacccgggaggcggagcttgcagtgagccgagatcgtgccactgcactccagcctgggcgacagagcgagactctgtctcaaaaaaaaaaagttgtttggatttttatcctttatccaattcattatatgaacactcattaattccaataatattttaatcaattctctggtcttgctgttgcagataataattctatgttattgtaattagaccccttatttttgcttctcatcttactgaattggtaaaaacggccagaacagcattaatgatcatgataatagtattcattcatcctaattttgtttaataggaaagctcccctttcatcccaaagaatgatgctggatggtactttgaaaaagagtttgaaaaagagagatactcattataaaatctttttattcctggttttcttagctattttgtaaggaacgatcactgaattttatcaaatatcttttgtgtttgtttgtttgtttgagacagggtctaggtctgttccccaggctggagtgcagtggcgtgatctcagctcactgcagctttgacctcccaggctcaagtgatcctcccaccttagcctcctgagtagctaggacttacaggtgtgcgacaccacacctggctaatttttgtataatatttttggtatagttaaggtttcgccatgttgcccaggctggtctcaaactcctgagctcaagcaatctgcccacctcagcctcccaaagtgctgggattgcaggcatgagccactgcacctggtccctcaaatgtctttttaacatcttttgagttcattctaaggctttgactcattaatatattacatgttgataataacaactgtaaattttctgggataaactctccggggtaatggtttatttttcttctagtatattgttgacatatgctattttctatttcagactttttttacccatcttatttatcagggcaataagtatatatcatatgtaattacatttggggattacattgtacatacacttatatcctgaattttctgtatatataagcattttcctatggcattagaaattcttcaaaaacatatctgaatgactgcgaattaattataggtacactataacttactccttcctctgtttttcattgcttcaggtttttttctaactttctgctgttataaaataatgcataggctgggtgcggcggctcatgcctgtaatcccagcactttgggagactgagatgggtggatcatttgaggtcaggagttcgagatcagcctagccaacgtggtgaaaccctgcctctactaaaaacacaaaaattagccaggcgtggtggtgggtacctgtagtgccagctactcaggaggctgaagcaggagaatcgcttgaatctggaagcagaggtttcagtgagccaagatcgcgctaccacacaccaacctgggtgacagagcgagactctgtctcaaaataaaataaaataaaaataatgcagagatgaacatctttatatataaacttttgttcatatcttggattgtttccttagtgtattagtttccaagggctgccacaacaaattaccacagactttgtggcttaaaacaggagaaacttattctttcacagtcctggaggccggaaatccaaaaccaagttgtcagcagcgccctgctcctattgaaggctctaggggagaatccttcctcacctcttccagcttctggtggctcctggccttctctggcagcattattccaatctctgcctctgtcttcatgtgtgcttcttccctatgtgtgtctatttcctctcctcttttttataaggacatcagtcattggatttaggtcccaccctaaatccaggaagatcacttctcaagatccttaactaattgcatctgcaaaacctctatttccaaagaagatgacactcacaggtaatggggattaggtcttggacacatcctctggagggacacaattcagtccagtacgcttagtgtgaatttgtgtgagcagaaataggaagtcaaggataggagcatttttaagcctcctgatacctatcacccagttgttttccaaagggtgtaaaaggacctgctcatttatcatcaatggtatggagaatacccatttgtctacctctttgcctgcattaagtattaccattttaaaaaatatattttcttcttggatacagtaaaattggaaattcattattttaaaatttctttaataattggtgaagttgggccggacgcggtggctcacgcctgtaatcccagcactttgggaggccgaggcgggcagatcacaaggtcaggagatcgagaccatcctggctaacacagtgaaaccccatctctactaaaaaaatacaaaaaaaattagccgggtgtggtggctggcgcctgtagtctcagctgctcgggaggctgaggcaggagaatggtgtgaacctgggaggtggagcttgtagtgagcctagatcgagccactgcactccagcctgggcggcagagtgagatccagtctcaaaaaataataataataataattgttgaagttgaacaaaatttttgtgcacttactatgaatatttgtatttcttctaatgtaaaatctttgtttacatctcttgcccatttttcttttgatgcattagtgctcttcttatagatactaacattatatatgaagaatattagccagttctttgacctattgcttataagtatttttctagtttgtcattgaccttttaattttgcagaattttagccttctgtggtcaaacatatcaatatttcattttttttttgtttttaatggggtcttgctatattgctcaggctggtctccaactcctgggcttaagcgatcctcccacctctgcctcctgaggagctgggactacaggcatgcaccatcatgctcagctgttcattctttgttttttaacctagaaaatgcttccctatccagacattagctaaatatttacgtaagttttctagccatgttatagttttcaagttttacatttttactctttatttcacctatagcgtatgtgtgtgatttgagtatctaaataggtgggtcattttttccccgtttaaaaattgatgttcccagcacgtttattaaataattcttttttttttttttttttttttgagatggagtctcgctctgttgccaggctggagtgcagtggtgctatctcagctcacggcaacctccgcctcccgggttcaagcgattctcctgcctcagcctgctgagtagctgggactacaggtgcatgacaccaggaccagcttatttttgtgtttttagtagagatggggtatcaccatgttggccagatggtctcgatctcttgacttcgtgatccacctgccttggcctcccaaagtgctaggattacaggtatgagccaccacgcccatcctaaataattgttatattcctcactgattgctttaaagcagttgttttcaaccagaggtgatttttgcccctccccacaacactcccaacccggcctgggacatttgacaatgtcaggagatatttttggttgttgcagcagggaggggggtgctacatacatctaacgtgtagaggcaggtatggtgctaaacaccttaggatgcacaagtcagcccccacaacaagggattattcagctaaaatgttaatagtgcctctgctgagaaaccctattttaaaaattaacttacactagcaaccttccccatattagatattctttaatgcataaactactgctgctacccagtctagaacctactacaaagagttgctcatatgagaaacaactcaatcccaggtcaatggctacatttccttgggtgttcccttttttcttccaacttgaaggcccttttagttgttttattacatatttatacatatgggccacacatcctgactgggaattgcatggtttctccttgtcactgtacctctgaggtgtacctgtggcttccccacctgaattgcttctataccattgctacagtttgaatctcccctccaaatctcatgccaaaacttaattgccattgtgattgtattgaaaggtaggacctttaagaatgatcaggtcttgacagcttcaccctaataaatggattaatgctgctattgagagagtgggttagttgtcatggaagttcagccctgtttttctccatcttgtgcttgcccttccccaccatttgacaccttctgccatattctttccctgcaagaaagccctcacaagatgcaaccccttgatcatggacttcccagcctccaggactatgagccaaatcaactcctattctttataaattacccagtttgtggtatgctgttatagcaacagaaaatggactaagacaaccatgtagcatcagattcatccaaacaaaccctccaaactgggtgaaaaagatgcagcagttctctggtgtatgcaagaattgacacagaaacaattttacttctgttgtaacttaatgtaggagtctgtcttggtgctgtttattcagttctgttgatttgtttgctgggttttttacaaaaccacattatttttattactaaagtttatgatatactttctttaaatactttgtgtttaagtgtattatacactttaacatatgttaggccagcccccttcatggctctcattctaggtgaagttgggatgttcatggaattttatgaaacctacataaagctgtggtttctaaattttaatgtgtattacaatcacttggggagcatgttaagaagacaagtttcttgaaaacttaccctccctctgctccaattctataagatgggcatctgtaaaccaggaatctgcattctaatcagcatctgaggtgatgtttgaggcagtaatccttggaccccatttagagatacgctgctgtaaagtaatctgcacagaattgataactctttactgtctctccatttatttgggatgtctttttatcttttagcaaagttttccctttatatgttacatcttgcacattgtaaatggcttcttttttctattatatcttctaattatttttgcaagtacacagaaaagctgttgatttttagatatttatgttgtattcagccactttgctaagctctattgttaaatgtaatagtttttcagttaactcttttgcaggggtgaggtgaggggcttggttggtaaataagcctatcacctggaaacaaattatttttgcctcctcctttacagaattatacttgttatttctagctgttcacattgtccgaagcttccagaacattgcaaaataaacgttgcaaaataaacactaatagaacccacccttaatttgttcccataacaaccctgtaagttggtggcctactctttctttatattctaagttttattttctagaatagcaatttcttaccaactgtgagagactttgttctcaaatgtagcttgtctggcagaactccagttaccaaaaccaagatttcaaaggggattagggatcgcaccaactttggttttggatctgtaactaaattcagtaatgtgaaagttctagatggtaacctcttctaaaacaaaccagatttgttagtattgaaacctggactgataggtaacttttttcctgatttacattctttcattgtgcggataacatttctgcggctttatattttattgagaggctgatgctttgaacttggtcttccttatttgtttctacaaatctagcttaactactccttaaactatggtcattgaaaaaattatcaaagtacttactggcatgtttgagaaagctgcctgacaatccatatattgaaaagatggagttaaaagagatctttctgcagtaccaattgataaaactggttacgagatctaaggacagtaataattgatgtcttttttgtttgtctgtttaagacataaacggtagatatgtaaaaaaattgataaataactgtaaaactgcatcagctcaaaactgtgagagttgatatattttgttcagaaataaaattggcttgtagttttctttttttggagatatgcttatcagtttttggcatcagaaatagcctataaaaaagtttgagtagctttccataattttccatatttgagcataattgatttagcattaaaattagcttttctctaaaagtttgcaactgttaaaggatagttgtcagaaaaagataaattcatggctctcatacaaatatataaatgaatgcgttactttatggtacacgttaattagtgagggaatcaggcagatgttatagttataaccagttaaaaagagaattcagaaagtggacacatctatggaccaacaacattgattcataaatattgaaataaatgtgcaaatggaagcaaaactcattgttttgtggcagtgtgggagaaagaatagtcaattaaacgtttacttgaggccgggcgcagtggctcacacctgtaatcctagcactttgggaggccaaggcaggcggatcacgaggtcaggagatcgagaccatcctggctaacacagtgaaaccctgtctgtactaaaaatacaaaaaattagccgggcgtggtggtaggcacctgtagtcctagctactcgggaggctgagacaggagaatggcgtgaacccaggaggtggagcttgcagtgagcggagatcgtgccactgcactccagcctgggctgcagagtgagactctgtctcaaaaaaaaaaaaaaaagtttacttgacagaacagaatttgcatgtctatagacaagaattattttgccttgctgtaacctataacttaaagttctatgtatatacaattatagatgtatgtatatacatacatatatacacacacatacccccatcagtacatatatatattatagatactttataacgctactttgcatatctttcttaagacacttgatattttaattttctagaagcagctctaggatttcttcatgttaattttgctgtcttaaaaagctcattgattgtcgcttttactttgttattgtcaccctcgtggtttccttatatgtttctttctaaattcatgaagagggtgcatctttttctcttccttccctcctttctgtctctactataatgaaaatatctaagaccaccaatttatccctgaatatagcctgggctgcatcttcctacatatttgacaaatccagaaatatttgcatttcaatttgcattctcaccagcattgtcattttgattaaaagtttgctaacttgataagcaaacatgttatcttgtcttattcatactctcttttcagctcttattatcagcctatacaaatgctcagtactaatgtgctgttttactgtagctctctcaaaaaacaaaatctttctttgatcctgactgttctttgaactattgctccatctgtttgtttacagccaaagttcctcccatccctttctcaacttaattataacctggtttctgaccctgtgccctactaaaacctttcatgccaatgtcaccagtgacctctgaattgctaaatccagcagactcctctcagtgctagtcctggttgaactctaaggacatttgacattgttgaccacctctttgtcttgcacctttctttccttggctttcatgacaacattctttcctcattttcctctatttccatgaccttttttttttttttttttttttttgagacagagtcttgctctgttgcccaggctggagtgcaatggtgcaatctcggctcactacaacctccacctcccgggttcaagcacttctcctgcctcagcctcccacgtacctgggattacaggtgtgtgccactacgcccagctaattttttgtattttaatatagatgaggtttcgccatgttggccaggctggtcttgaactcctgacctcaggtgatccacccaccttggcctcccagtgttgggattacaggtgtgagccaccatgcctggcccttctatgaccactttttcagcctccattcctccattgccccctaaacatgagtgttctccttggctccatcctttcttcccattctacatagtccacctgggttattgcaacagtgaccttgacttgaatcagcacctctatgcagctgacttccaaacctgtctttaacctcttctgaactacaggttatatttctatcctcgtacttctctcctaaatgtctcgaaggcatctcagtgcagctcatccagacgggtttcttcaggcaccttatttttcttcttgctattcctgtcttagttactagatctttactccttactaagtctccatctttgctgctttttattttgctgtatctgccttgccttggctccatttgccattgatatggtttggatctgtgtcgccacccaaatctcatgtcaaaatgtaatccccagtgttggaggtgaggcctggtgggaggtgattggatgatgggggttgtttctaatggtttagcaccatctccctagtgctgtctcaggatagagttatcatgagatctggttatttaaaagtgtgtgttacctccccattcactctctcttgctccggccatgtaagacgtgcttgcttccccttcgccttccaccataatggtaagtttcctgaggcctctccagaagctactatgcttcctgtacagcctgcagaactgtgagccaataaaacctcttttctttataaattactcagcctctggtatttctttatagcagtgtgagaatggattcataacagccatctaccttttatgccattgtatattggctgctgatcactctgtggagacaaacttaggaattccaggccaatttaggccttcagtgtggaacaggatgtggtttttttgtttgttttgttttgttttgagacagagtctcgctttgtcatccaggctggagtgcggtggcgcgatcttggctcactgcaagctccacctcccgggttcacaccattctcctgcctcagcctcccgagtaactgggactacaggcacccgccaccacacccggctaattttttgtatttttagtagagacggggtttcactgtgttagccaggatggtctcgatctcctaacctcgtgatccacccgcctctgcctcccaaagtgctgggattacaggcttgagccaccgtgcctggcccctgaacaggatggtttttataagtctgttcaccctcctcacacctcagggattactccaaactcatatctcttcactcccctgtatctcccactaccttctctctctcttgtttcttccatccctcctttgccctccctctgactccatctctctcactctctctctctagagagagagagagagagagattgaaagagagcaaaaggcatgatccaagcctttcactttcctgtgtctcagccctcccctcctgggctgagggcccgtcctctgaattctcctgcagcacatggagccctacacattccctccctctttccatactttcagcctctacttctttcctattaaccataaaatatgctcaattctctattttttgaaaagcagatttctctcttaatttttaggtaggtttccctttactcatgcctgcacatctttcctttctttcacagccaagcttctcttgaaagtaacccacatttactttctctacttccccacctccctttcatcttacatcattgcagtgggaagtctgtctccacagtcctgctgaaactgctctgataaaggccatcactgatcgactcactagccaatcccttgacctctctccagccctcacctgtggcatttgagacagttgaccactccttgaccttcataacaaaactcttacaggtgggcatagtggctcatacctgtaatcccagcacttggggaggccaaggcaggagaatcgcttgagcccaggaatttgagtcagcctgggcaacatagtgagatcccatctctagaaaatgtcaaaaaaattagtcaagcatggcacatatgcctttggtcccagctacttgggaggctgagatgggaggattgcttgagcccaggaagtcgaggctggagtgagctgtgattgtgctactgcactccagcctgggcaacagagcaagactctgtctcaaaaaaaaagaaaaaggaaggaaggaaggaagggagggagggagagagggagggagggagggagggaaagaaacaaaaaacaactctcttgtgcttctgctgtttctctgatcgttcccattccccttccttggcagcatcccctttgtcctcccactgctggtgcttctctgtctttggctctcctgtgctctgtgctctcctcccctgccttcccgctggctcctctctcccttcacacactctccgtgtgtgctgactgccccctgctttcatgttccctctattaccactctgtgtagactcccaaatcaacacgtccagcctgaccacttacctgaacttgagaccctggttgtctcctgccttctgtacatctccacttttgtgcctcaaagacaccataaaacttgatgcatccaagacagtaggtaaagaggacaaggatactttgggaggccgaggcgggcagatcacgaggtcaggagttcaagaccagcctggccaatatggtgaaaccccgtctttactaaaaatacaaaaattggctaggcttggtgcacacctgtagtcccagctacccaggaggcttaggtaggagaatcacttgaacccaggaggcagaggttgcagtgagccaagattgcaccactgcactccagcctcggtgacagagactccatctaaaaaaaaaaaaaaaagggacgaggaaaagtaactagaaatagtaagagagagaggagaatgagagagggggctgtgggcaggggaaattaatttccaatgaatttttatgcatatctccatttgcctctgctctgtttggaacacgtgccatcttcatccccaccttttttcactagagctgtggttctcaaagtgtggtccccaggccaggagcacatcagcatcacctgggaacttgtagcaatacaaattctcaggtttcacctggggcctactgagccagaacttcagaggtggggcccagcaatttctgttgcaatagcccgtgcaggtgattttgatgcctgctgaagttcgagagcccctgcactggtgaatgactcattcttcatggcccagcatcagtgctgcttcacctgcagagccttccctggtcctgtcagttagaactaatgactttctcctccatgttcctgtagtactttattcatgccaattatatagcatttattctatcatagttagctctttaagaatcctcctcccccatagattatgaggtctaaggttaatattaatctttgtatttctagcactggcctagtgcctgtgcaaagtggacatatattacattatcacaaattacttttatttttcctgctccttgccttttcttcttcctttcttctttgcttgaacctgacttcgggatatgaataaattaccagaatgagaccttaccaatgaaaggtaatgttttcattggattcaagctttcaacccgtttatatctatctatctgtgtcagggttcaaagagaagcaaaaccatgatgtatacacacacagtttacagggatttgagcttacttaattgtagagctggttaaactgtgtgaagctgttttcttcacttctgatgctggagttagaagtccactgggcagagagttaggaagggacagatccatgggaagaaggcatggagggagagcacagggaagcaacctaccacaagctcaactagaactcatgagcatcaacccggacccacaaggactctggaacccggtcagccctcgtcagccttgatggtgtgagtgtcctgcagaaagagggtacctttcgtcgtggagctaaacacactcctgacccagcagtcagagaagcccaagaagcatctagaggaagggggagcagtggcaggcccagcagatgccccacaccaagtaggggagccacagaaaaacaagtacgtgtgcgagctgtgaaagcacctgccctgatcctcggaacataagaacagagtggctctgaacatctaaaattattccaaaataaaatgggagcatttttgtaaatggctgctgcttcactttcacctccaaattacgtgtgaaaatgtctcttgtgtccattctcaccggaaacacacaggtaaggaaactctgggaaacacagatcaggtgagccaaggtgacacagtacaaagccaccacaatatctacatgactgaagctgaaatacctgaggtttactctgtgaagtaaaataggagatatgggcaattatttgccaaaaaaaaaaaaaaaaaaaaaaaagacccagtatgatctgggtggtgagggaaacctttcctagattggctgacagtggaatcggttctggaaagatgggtaagaattacacggggaagacatgccaggggagacaaaatcatgattcttaaccgaagaccctcggtcaccagtgaaaggcataattacgctcagtatgtagtctttactgaggtaggatagacttcagaaagactatcagtaaagatcgaaagcgaggccatctagttttaattaattagaagaccatctaagcattataattaattgagaggtttttgtaagtggtgagtgtcataaagcataataaagtttagttgtagtgacaatagcccaggagtttggattcaaccacttactagctgtgtgaccctgagcaagatattaaacctctgtaggcctttatattttcatttgtaagttggcagtaaaaatagtctccaccttacagagctgctgtaagggattaataagagaatccatgtaaagtactaggcagaatgttaggcacagggcgtattaactgctgccaatatcctgtcatcatcattattattgttgttgttattatttcccaaggaaatacttttttaggcagggtgattccaaaggccaaatgatatgtttgaccattcaaagtacctggccaattgagcagataggatctagcactgactgccagaagaaatgtgttctacttgttcttattgcttccttggattcaaatatagttgtccttatctcctcatccacaaccccaaaatgtttttctgtactttcctatcaaagttttttatcttgggtgagagcagtggctcacacctatgatcccagcactttgggaggccaaggtgggaggattgcttgagcctaggagtttgagaccagcctgggctaaatggtaaaaccctgtctctactaaaaatataaaaattagccaggtgtggtggagtacacctgtagtcccagctattatggaggctgaggtgggaggatcacatgagcccaggaggtggaggctgctgtgagccatgatcatgccactgcagtccagcctgagtgacagagcaaaacactgcctgaaaagcaaaaaccaaaacaaaagaaaatgtttttttttttcttttgcctaagaaatgggctttgcagcctttctccactacctgcttttatcaggccttgggcaaggacggttttacaacccagggagcaaaccacagccaccctgcccactcatgaggctgtgtgcatgtgatcatatggcctccctgtggcagaatttagggacttgtcttgtgggggctcagaaaaacagactaatgtccatccacagccgtgggtgtcatttcgtaaccatattcaaagctgttaagcatttttctgccagagagaaagggctggatatcttttcatctttgttaaacaatgaaaaacaaagaatggaatgttatcttttaattaaagagctattctatccccctttctttatcctgaatattgagttttcataaatctttatctcctgtaaatcttcagtctcatccctcccacctcccatcgttaattagattttctggtttgtagccacttgaagtggagaagaatcactgaactagactttggaaacaatacagttctggttttattactcagtttcagcatggatcagattctcagaatgtactttcatttacatatctgtcttttataacaaaatctacagatcctatcaatgcaacaatttttttctcctttaccaagccccaactgactttattccaaacacgcaaattcactagcagagtacattttaaagtttctattcattgaaaggtgtgtactgccggccctgtctcagctgcgtttgcaagaatgaaatgcctcaagtgttctttgtatggtcacctcctacctccaaaatatttcttgaattcattgatttcacaatgcttgattcagtatacctgtgtctctctgagaacattgcaataggttcctgctcccccagtactatagccatgctgtaatcctcctcatcggtaaaaatccttctcatttagtttgtaatcacaccgtgtttctgtgcctttgtttgagcggtcccttacccaggatgcctgtctagctttatctacttggtgaattccttccagaccatcttaatgtcacctcctctattcatcagtcccagcttcctcaggtgggattatgtttgccttactctgggctttgtaggacttgtttgcattatcaaagttgctacatttgcattcgtgattacgtaattgtgtctgtctcctcctctagatgccttcaggttagagtctgcctttttcataattgtaccttcctactacccaacagaatacctgacccagggaaggcactgggtaaatacttgtcaagtgaatgaaaatctcctttttcagtggttatataaataagaaggaaagacatcataaagacaattacttgagtaattttctgcagagactaaagaaagctgcaagtaatttgtttgcgatttaaaagaagtgggtagattaaaagaaattcacagctaaataatgaaacgtgggggtcccaagacacatgtctctctttttagaaatgtctacctaaatgtacaatgaatgtttttggaaaaagaaaaaacagatttttttttcaacacaaaaatcaaaaaataaaatacttatgaaataaacttagattctgtaacctaattttgaattatggtcatgttttagttgctgtgttgtttttgttttgtttttcgcgtgatctcggctcactgcaagctccgccccccgggttcacgccattctcctgcctcagccttccgagtagctgggaccacaggcacccaccaccacgccctgctaaccttttttttttttttgtatttttagtagagacggggtttcaccgtgttagccaggatggtctcaatctcctgacctcgtgatctgcccttcttggcctcccaaagttgttgtgttttaataaagtaggttatttgaggccaggtgtagtggctcacacctgtaatcccaacattttgggagacggaggtgggcggatcacctgaggtcaggagttcaagaccagcctggccaacatggtgaaaccccccccatctccactaaaaatacaaaaattagccaggtgtggcggcaggcgcctataatcccaactactcaggagactcaggcaggagaatcacttgaacccaggaggtgaaggttgcagtgagctgagatcacgtcactgtactccagcctgagttatttaaaaaaaaaaaaaagttatttgtgttgtaggagttattaagaaattattttaggcaaatagagagggaaaggggtctttgggaagttttcattttttaaagcatttccggaaagtttcttgtaaggccccaccaggccggcaaactttgatatacaaatgcaggccattagaaactgggtccacccaaaatggcgattcctgcagccttctcgcccttgcctcacatgttcctggcaacatggccacccccacatatccccacgtgtgtagaacatcatggcaatgcatttgcatattaaaaggctgggatgagagggccagctttctcgcagggctacgtaagtgacatgcctagtcaaaccaatcccctgagccctatgcaaatcaaacaccgcctcctccaacctctgtatatacacctgactggtatccatgacaggtggggacctcctcttttggttttggagcacccccccgcccccatccctctggctgtgtacgggggagcctcttccttctgcctttctcttttctttccggcctattaaactccttaaaaccactcctcatgtgtccgtgtcattttatctaaactggcatgaggacaaagaaccctggtgttcctccactcatcaaagctgtatcatttggaccctaccctctgacaaagattcttcatgtgactaaactttggtcagggctcctgaaccttctactgggcccacctgtgaatgccttgtaaaatcccgttttagcaaaaaaaccccagccttcaatacctgatcattctccatgtcgggtttctattctccaccatcccccaggtgacatctgatcaccctggtgtctttggcaagaatcccgttaggttggtttagccagaatcccctcttaccccttatatttcctcttagtaattttctgtccacagccccccacccagctccttggctatagattcccacttgctcatgctgtatttggaattgagctcaatctctcttcctaactgcaaatcacattgcagatgtccccgtacctgtctccatggtcctgaagaaagtcagccttactgcgctttaacaggtgtcattaaatagttttttctgtaacatctctctttcctttcattcctttatcattatgcagaagctgaagaccatacaccgtgctatctgatgcctctcagggaagtacaaattttgatttcatgcattaagatgctgaacttcctttgtacccaaataaacctgcaagcatctcttttcctttgtaattttatcatttaactcagcagggaataaaattgccagggctactgcctgctagctgattgccagaatgtgttctgtggcgtgttattggagcttactcccatcttgtcaaagccatttcaaaagtatccagtgttttcgtctctctacattgtttcactttggtcgcttgtggattttggtgagataaccaggactggccacactcaatcttaccatttcagaccagaggactcccaaggcagggagctgtggttagaatatgggggtggtagttcttcctgtagcctcctaacctgtttctacctcccatgtttttatggttttggagaataccataaacaaagagcaaacaaagagtaaattttttttttgaataaagttctcgctctgttgtccaggctggagtacagtggtgcagtaatggctcactgcagcctcgacctcccaggttcaagcgattctcccacctcaacctcccaaaatgctggtattacaggtgtgagccactgcatccagcccaaagagcaaatttcatcctctaagcaccaccttcactttatcactaataagtcagtgctgcccattgcccaagcatggcctccttcagtccccctcctgagcgttctgtcctggccccacacagtctgactgtggatgcctctccaacctcacctcccacgtcacatctcaatcagttaccctgtgtgtcatcccctctgcatcaccgagtcttctccacaaacattttgcatttccttttcaccaagatactcttgctgatagccttccattccctttcagcatcttacaattctgtttactacccaaggcccagcttgaatgctaccttctccatggaccctgttctaatccccatggtcagaattaatcactcgtactgtgtggatgtaagaattcatcttctatgtgtgtatggcaattttcaggctgttccgcatgctgtagttatttgtttacatttctgttcccttagccaaggcttctgcttttgttttgcttttttcaatcttatatttcccatttggtagcacagtgcctttcatttattcttcaccagatacttattgaacactgctatgggtgaggtcttgttttagagactggggaaaaacaaggagcaaaaggtaaaaatccctaccctcgtggagcttgcaattagtggaagaagaaagtctgggattaaaatagataaaatgtaatattaggtgctatggagaaaaatatagcagggtgacataggaaattctaggggttaggggattttcaatgggatgctcagggaaggcctcaccaagaaggtaccatttttgccaagacttgtggtgagggagcagccatgtgcctttctggcgggacaggggacagtacaccatatgtgtggcctgtgcagggaggtgtctgatgcgttcaagtaatgcaaggagactggaatggctggagccaggggtgagtagtgcgtaaagtcagagaggaagggacggttgctctgaggtaggggcttagccagtttttgtgtgtgttttgtttgtttatttttagagacagggtctcactttgtcacccaggctggaatgcagtggtatgaccatagtgcttattgtatcctcagtttcctgggctcaaggctctgccttctgagtaactaggactacaggcacctgccactacacctggctaattttttaatttttttgtacacatggaggcttgctatgttgcctaggttggtgttgaactcttgcctccaacaatgcacccacctccgtgctggtataacaggcgtgaactaccatgcccagccttagtagggtattgagctaaaggatgacatgatctgatcagtgctgtcatagtatttccctggctgctgtagcaaggagtggttcagtttgaactcttattttggctcaggattttgggcacattgaatgtggggtgtgggagaaattgaggtgtctaagacgatctcaaggctttcggcctgagaaagaggaaggatggggagccaccattcatggagcaaggcagactgcggacaaagcaagtttggggagcaagactgggaggacactgtgggtgctgacatagaaaggtgtccacactgagatgtccacattgcatggttaagtaaaaaatttcacactttcacatatgtgggggagaacctgggaggatgtatattgaaccattaacagttaactgtttcaggcatggcactactgggcatttttactttccaattatgaattgcatgtctatataattcacaagtccagataatgtaaaggtaacaaaaatgcctaagaccagtctgcccaggtccactgtctaagccctcagtgtgacaggtttctttcatcattcactagatggtgcacaaactgcagaacacctcacaatgacaaatttataagactgttttctaaaccagaatggaaatgtacagtagactcctttatcagcggtttcactttccacagtttcagttactcatagtcgactgaggtccaaaaatattaagatattttgaaatagatggggaggagcacattcacatagcttttattacagcatattattatagttgttctatttttttattttattattagttgttactctcttactctgcctaatttataaattaaactttatcttatgcatgtatgtatagaaaaaacatcgtggccaggcttggtggctcatgcctgtaatcccagcactttgggaggccgaggcgggtggatcacttgaggttaggagttcgagaccagcctggccaacatggtaaaaccccatctctactaaaattacaaaaattagctgggcgtggtcacacgtgcctgtgatcccagctacttggggaggctgaggcaggagaatcacttgatcctgggaggcaggagttgcagtgagccgagatcttggccactgcactctatcctgggcaacagagtgagactccatctaaaaaaaaagaaagaaagaaagaaagaaagaaaaagaaagagaaagaacatcgtatatatagagtttgttactatctgagatttcaggcatctcttgggggtcatggaatgtgtgtgtcctttgtggataagggggtactacagcattcaccatggggctaaagcaacaatagttgtttgcttaggaaaatcctttctggtgagtaactctgttcagaaaaccatgttgtaggccaaaaggtgacatgataaatgtagatttacaacaaaagaagtgaggatatttctgtcgagcaggtttggcagattgctgttctttactgtcaggttgcctctttccagaagactaacactcgtcctccaaatcaaagcagtttgctcccccatacgacactgttcagacacactgagaatgctaatggttcaacttcttcagtcaatgaatatgcccttaattcaccccaggcgaggaacaagtcaagatattggggggagtataactgatttgagaatccaaataatatgctataaatagttatctaaggaagagaacaggctatctaataactgatgagctacttctaaaagaagaatattctctcagtccatttttttgtactctaccaagtaccgtagagctgctttaaaggtgaattagtcaggttccaatcctgggaaggaagttgtgcaggcaggtggcaagtcctgaaaggtacaacagtgcccattgtctagaaactgggcagccaaaccccagtagggaggagcctgctggtctaggaatggtaaagggaacaaaaagagaaacccctcgtatgtctcaaaggatgatccccccaaactccgccctgccctaccctcccacctaggagaggaaaatggtgtcaacgtatgatccacttcatagggaagtagaggcggctgaagaaggcagctggcataaaaagctgtaaagggacagccaggagaggactgtcctatagaggtagcccaggacaaagcccagtgcatcccgggtctggtaagcaacactggagcctttggagagccgctgaggggcacactggccagaggccagggcacggagcagctcatgccggtcactactttctttctttttttttttttgagatggggtctcgctctgtcatccaggctggagtggagttgcttgatctcggctcacttcaagctccacctcccgggttcaagcaattctcctgcctcagtctccccagtagctgggattacaggtgcctaccaatatgcctgcctaatttttgtagttttagtagagatggagtttcaccatgttggccaggctggtctcgaactcctgacctcagatgatccgcccgcctcagcctcccaaagtgctgggattacagacatgagctaccatgcccagcctggtcactactttctgagaatattttttagtctctgtaaggagaggtaggaaacatgtcagtcctcttagcagtgagcttgcaagttgttgttagaatatgttattgctctacgtgcttcattttcttggttaactatggagccactttgtctgatgactgtatagtcagttttccagagaaacagaaccaataggatatatagagatatagaagaggagatttattatgagaattggcttaggcaattatggaggccagaagtcccatgatctgccatctgcaagatggagaccctgtaaagctggtgttacaatccagtccaagtctggaggcctgagagcaaggggagccgatggtgtaactctcagtccgaagctgaaggcttcagagcctgggaggggtgcaggtatgtgtctggaatcccaaggctgagactggagttctgatgtccaagggcagtagaagatgggtgttccagcgcaagaaaagagagaattcattcctcctctgcctttttgctctatcagggccctcaatggattgggtgatgccttcccacattggtaagggtgagttttctttacttagtctactgattcaaatgctgatttcttacagaaacatcctgacaagcacactcaggaataatgttttaccagatacctgggcattctttagcctaatcaagttgacacctaaaattaaccattacagtgatcttcctgattttgctcctatttctgaggacacactcttattcatatcctgtaaccttataagtgcttaaaataaacatgaaatgacatcattggtgggaaatgagagaggatttaaggaagctagggaaggctgataatttacaaggtctgttccaggtcggtttttgtacagggtactgtatgaagtgagaaactacattgggtcacctttcacgaggtgtgtggagcaccaacaggctttggaaggacaggcatcaggcagttaactgcattttacaagtccctggtctcactgtttttcattctggtcgtgtagtggtcctaagcgttctggggagttcgggttctgagttgttgattagttcttctggccataggaaggatgcaggatgatgtacaaccttccccacatcagtctgaactccaacaagaaacctatgatctggtatatttcacatgtgttttgtccttccaaagaagtcatcagcgtaaagtaatttctaagagactatttgaaggatttgttccttttgcttcaccaagaggacattaaaagcatattctacattctctgtcaggtttctgactgagttcctaagcagtcatctttcagctggaatagatctgcagttttaccttctttttctggaccacaaatgggatgggcatcagtggtactgagacaaccatttataacaataatagcttccaattattgaatgcttgccatgtgcttatcaaatagtcttatgtatgttaactcccttaatcttcaccacagccctaggaaataggtactattatgatccccattttatagatgagaaaactgaggcttaaagaagtttaagcagtgtgtacagtatcacccagctactaagtggcagagcctggatttgaaaccagagaatctggatccaggctatgtgctcatggttcctgctctgttctgagttcccattagaatggagcatggaagaattatcattttgactatcaccctggtataacacatccactgagcagctgccagcttgtttgaggaggaggttcgagtttagtgtttggggcttgatggtcaaatgcatctgcctggcatttcttagtcttcgtgttctaccattagccacataagattcaacctgaatttgcttctcgggtccccatctcttgaactttctgggcctgtctgtcctctggggatctgagtggtgcatttcttgttgtgctctggtttgcttcatgtttggttgtttctcttcactgaaccaggcctgaggtgttgatgtcagagcctagcaaggagagccagcattgtgaattgtgaaggctcactgtttgttttggcacttggagctgtgactatgggccagaaagagggttgctgtgatgctatttcaaagctgtagaccaggggcttccaggcacaaggatctcattttcagttagcttgtggtcaggctgccgtacagatttggttttttggtttgtttgtttttgccttagggataggaaggcacgtgaaatcactgcctatggctgaaggactagaagagattcttttttttttttttttgagatagagtctcactctgtcgcccaggcagaaatgcagtggcacgatctcagctcgctgcaacctctgcctcctgggttcaagcgattctcctgcctcagcctcccaagtagctgggattataggcgcgtgccaccatgcccggctaatttttttatttttagtagagacggggtttcaccatgttagccaggctggtctccatctcctgacctcgtaatctgcccacctcggcctcccaaagtgctgggattacaagcgtgagccaccgcgcccggccaagagatttctttagaactgctgagtcagtcatattgggagtaatcacctcactgtcatctataaaatgaaattagtcatgttacccagccattcctatacttctcagggtgctgtgctgaataaaatacagtgaaatctttaaggaaaacttatgtgcgcatatttataaaacctttctaaaaattgtatatgtcaaaggtgggccactgctaagtgaggaacccattccctggccttaattcctccctgtgctgaggggaaccacctagtcacttggaactcttgggtatcagtggattcaccagagtaaggttctgttaagttagtgtcacctcagaatcgttctgttaagttagtgtcacctcagaatcaatgtacctctctagtagctaatggacagagtgattttgtcatttttatagagaatagggtgaaacatcaggtgaggtgtttgggcttcaattaacagagtatctgaatgtattagctagagtgaaaggttcagctgctataacaacaataaggcaacaataatgtggcttaaaaatgaatttttttttcacataacagtccatggtggctatttcatatcagtgaggggcgaaggggctcatgataaccaggccatctgcagcatagctcctgtcttccggtcatcgtgtcccggttcataggaaatgagtatgtgccaggcaggcttacattccattggcaagaattaattcatgtggctacttcacagtgcagaggaagatggggagagtcatgtagctgggcagccatgtgcctagctattcctctgacacagtggaagaagagaagaatggatgttcatagtcagctggctgtctttgctggagtcagtgcctctgaccaccaagaatcagtgaatgccccaatttctacacatagaacacacttgcttcatcccaagggagacaaaccaaagccccatccagtaaatgcactgcctgaaaatccatggtcgctgggtaacgtatgaattatttccattacgttccaacatggttcctgatggtcttgcaacctgtgagctaaaaggcaagttatctcccgacttctgcactcatactcacattcaatataccacggtagaacagggagcagaaaaacacaattaaaactcctattggaaaaagaggaggaggaaatgcacacagcagcccctggtccacagcaaggctgggatcctgcagcaggcaatgggaaggccccttgccccggcagaagaggagcttgcctgactagactctggttctgctcttcaggagagcccttgctcatgctcttggtgtcccttggtcttgcccttggggaaggggcttctctgtgttcagtttcctccttcgccaaatctgaagtgggtgctggggttatcccccgccttggtggctgttcagcttttgcagcccactgcctgctggtgcaaatttggaagtttgagagtgcaacagtcatattactggcttggctatggtccctttgctaatgcagttcaggtactcagaacttccagccagttcacatgccagccttctctcccaaccttctttccaagacttgggctatctgcctactttatttctttgcttccttgccctccatgttttcctctctcaatgtagtggcagctatacggagccctctgagacagtagagttgggagggaaggcaaaacccttattttcatctccagtctcttgctgtttgaggtttagaagtcactggcttttccaacccttcaagacaccaaatttctaaactcttcctcttcttttgtatctctctttgcaaatcagtccgggtagaggctcaatagaaatgtagtctgcttttcaagttaggtcaggtgacaggttttttttttaaggtcaacagactttgttggcacacaccagattttagtcacacattttccttatgactgtctttttttttttaattgtggtaaaatatcatgacattaaatttatgattttttaagtgtgcagttcattggcaaaactgaaactccatacccattaaacaatacctcctcattcccgctattcctttttgtttgttagttttccttctaacagtcaggcccctctgctgcaggtctgctggagtttgctggaggttcacttcagaccctgtttgcctgggtatcaccagtggaggctgaagaccagcaaagattgctgtttgttccttcctctggaagctttttcccagaggggcacctgccagatgccagccagagctctcctgtatgaagtgtctctcgacccctgctgggaagtgtcttcccatcaggaggcacgggggtcaaggacccacttaaggaagcagtctgtcccttagcagagcttgagcgctgtgctaggagatctgccgctctcttcaaagccggcaggcaggaacatttaagtctgctgaagctgcacccacagctgccccttccccaagttgcccttcccagggagatggaagttttatccataagcccctgactggggctgctgcctttctttcagagatgccctgcccagaggccactttttgttttttgataatagctatcctaatgggtgaggtggtacttcatcttttttgaagtggctttttaaacttctaaaaattttggtgaaatatatataacaaaaactgccattgtgaccattgctaagtgtataattcagtggcattaattatattcacattgttgtatgaccatcaccactctgtctctgaaactttttcatcaccccattgatgaaaattttaagtgaattttagacatgtgacaattggctgctaaatagtatactcctctagaaaatggacattttcctgtataatgaaatcgtgttatcatatgagccttcattcattttccattggagagaacttactcacagggccacacttattacaaaggaggctgcgaagtataaggtaggcgagcagccgcttaccgaattataatggaaggagacagagtggattttggtgctctaccaccctacagtaataaagcaataatgacttttaatttattcacattacaagtttggaggtaggtgatattgagcatttggtagtgtcttaatgatgttatcaaggattcagttcttcccaccgtctaatctgccattctcagtatgttgactttgggtcctcatgtttttttgtctcgtggttacattatggctgccatagcactaggtaccatattttcactatagcatcccaagtgggagagaagtagggtgggcagaaaagaaacaatccactatcaaggatgcaaattcttcccatttgctgctcagtagacttccccttgcatctcatgggccaggttcaaaggagtctagaaaggtacttgttaaaggaaaatgagatcactatgattggcttaacaactcatgacctatagccttgggctgagcacattgctgtccctaataaaattagacttctattagctaagaaaaagaggagaaatgactgttgggttggcagttacatctgccacatgtgggcaatatttttattattattaaagatataaacggactctgaagaggatcttggcatagaaactctaagacagtattattgaattgaagtgctggtagaagggaattccttctgggattattctgtcaatagtgtagggacaggccaggcgcagtggctcacgcctataatcctaacactttgagagtccgaggcaggtggatcgcttgagcccagaaattcaggaccagcctgggcaatatgatgagaccctgtctctacaaaaattagctgggcatagtggcacacgcctgtagtcccagctacttagaaagctgaagtgggaggatcacctgaacctggggagattgagtctgcagtgagccatgatcatgccactgcactccagcctgagtgacagagtgaaaccctatctcaaaaaaaaaaaaaaaaaaaatagtgttgggacaatgtgctccattgatttctgagaaaaagaatccttaggtcactggcatgaaaggatccctatagtcctatagtcatctatcagttgaatgaaggtgattgcctttagaaatcaagacagcattggagaaaaactagttgccattggttcttaggaatcatcatattcttttgggaatggtaatgtttaatagaaatcttttactacatattgtttcttgccagcacttatgaaaaatgttgtaggaacagggggattggcctcattaattgaataatattgtttatatctgcggatggagggaagtcatatactcttaaagtgacaccaggtcacctgactattatgccttcccaaacttaggattcagtgaaaacaaaattttctttgttagcagaacaagtgtgacatttgttggttgtgtttcatatctccccaggctgatttatatccgagagcctgcaaacattttaggggaaaaacaaaataaacagtcctcatcattaccccttataattacaaatgaatgataagataataaaagcccttcacacttgcccatgacacaaaagaaaaataagattcacaggtggttaaaaaacaaaccaaggatgctcttggttcatgggcactgtgacagtcgtggtcatgagtgggcgactcgttcatcatttctgcttcattccagttggccctgagagcagaatgaaaaactattgtagcaggaagctcatttcctgataaattacaagacaaaaaaagataaccaaagacccccaacagcactttcagcataatacagttaacatttattgaaatgcctactgtatgccagccactgttctgtgtgctttaaacatattttcaatcctcagtaaaaccctgtaaggtagataccattattatttccactttgctgatgaagaaactgaggcacagagaagacttaaccaaggacacacaactaataagaggcagagctggattccaagccctggtagcctggctccagagtctgtgaactatagctacctctctccattgccccagggaggacaaagtccttctatttataataagcaagtcccttccaacccttggaaatattaactacaatgacacttcacagtcattgttgtaagtggttctcactaatcaagttttttttttgtttttgtttttgagatagagtcttgctctgtcgcctagactgaagtgcagtggtgcgatcacggctcactgcaacctccgcctcccgggttcaagcgattctcctgcctcagcctcccaagtagctgggactacaggcgcgtgccaccatgcccggctaattttttttatttttagtagagatggggtttcaccgtgttagccaggatggtctcgatctcctgacctcacggccctaataaagtttttaaagctgtaaatgaagattgggctttacttttccatttgtagcttccatttccatttgctgcttgataaaatagaaagtttgtcctcaaggattagcatgggtaatggtatgctatgttctttcactctgtagcttcagtagctaacactgtacaaactatctgttttgaatttgatgacagaagtatgaataatcatgtgagtttgactttatttatttatttatttgtttgtttgtttattttttgagaaagagtctcactctgtcacccaggctggagtgaagtggagcgatctcggctcactgcaacctccgcctcctgggctcaagcgattctcctgccttagcctcctgcatagctgggactacaggtgcgtgccaccacaccctgctaatttttgtatttttactagagatgggtttcaccatgttggccaggttggtctcgaactcctgacctcagatgatccgcccacctcagcctcccaaagtgctgggatttcaggcttgagccaccccacccggccgtgaattttgactttataaagacccccttttcaaaccaactaaaggagttaagagtcttaaataataaattaatatgggcttatagtaacactctgttcacttccacaaaatcgtacattttcaagtggccaggtgttctcttggctatctgcagcttgaagacttccagagcaacaaaaatgtcaatagtgggagcctctgcagacctcatgctacaggtcattttctctgagaggaacaaagagaactgcagggatgccaggtcacaaagcgagcggtagaaggtggggattttcatcatctgactcaaagtgttgaagagccccactgtgcagtctcactcacaccacagattgagtaaaagaaagtgaagataactcagacttagggaatgacatttattggaagaaaagaacatgcgacagaaatatacagagagtttgcagtattggctctttaggaagagttgaccatctggataacagctttgcaaatcatttggataaatgataccatttggaggagagtcttccaaagcaaatctaaatgccagaaccctttcaagaaggtttatgcagttctggcttttttcctccatttgttagaagctcatgaggtgacgttgtcctagatataattaaccatttaggacatgggaagaattatctttaatttttttactgtgaagtattattggaagattaatatcaacagagtaaatattatgtagaataaaaaagaagtacgggccaggtgcagtggctcacacctataatcccagcactttgggaggccaaggcaggttgatcacctgaggtcaggaattcgagactagcctggccaacatggtgaaaccctatgtctactaaaaatataaaaattagccgggtgtggtggcaggtgcctgtaatcccagctactcaggaggctgaggtgggagaaccacttgaacccaggaggcagaggttgcagtgagcagagattgcacccctacattccagcctgggcgacagagtgagaccccatctcaaaaaaaaaaaaagcacaattcagaatgtaaagatacaacaagccaggtgtggcggtgcatgcctatagtcccagctactagggaggttgaagtgggaggatctcttgagcccaagagtttgagttcagcctggacaacatagtgagatgccatctctttaaagaaaaaatgcaaagacaaaactattttaggagtatggaatattccattcttctccccctctttccttaaagagggaaatgtactcttctagctgggaggaaacttgtgatttagctcagggaaagagtggaacttattcttgctaggaaatataagtaaagtttgggtgacactttctaatgtgactagaagcaatgggccagtttattttcatggtgtctggaaggatgcaagaaaaagatccatctcctacttttaactttaattctcaggcagcagtaaggcaaagttaacaaagttaatttgcccatggcagtggctcacgtgggtggatcatttgagctcaggagttctagactagcttgggcaacgtagtgaaaccttgtctctacaaaaaatacaaaaaattagccaggtgtggtggtgtgcagctgtagtcccagctacttgggggctgaggtgggaggatcgcttgagcccaggaggttgaggcagcagtgagccataatcactgcaccccatccagcctgggtgacaaagcgagatcgtgtctcaaaaaaaaaaaaaaaaaaaaaaaaaaaaaaaaaaaaaaagagagagagagagagagttaatttaatatattgtttatcctttgcaaaaaggtactttcagtcaggtatctgaacttgtcaagccaaggcagctcagagagtcctgtgaaactaaaccaaattaaacattcatctccaggaacctcctggaatcctttcccagtacctggagcagcgagcacatcagagtcgtttctctattgcgaattctttagtcacaatataagctgacaagcgcaggtaaatgagaatcagtggctaaatgggacatcccagtaccttgagccaggaaattagtatataaagctattgtagcttgatgccatagtcttagaattatcttgttaaccctcttcactctacctccctgcttgaaaatttcgattcccatatagacattcctaaaaggggagccagcatgagtatttgtccatttgacaattgtgcctcccattgtacattaacaagttgtcattctgatttattcatcaatctgttgtaacaatagttaacattttctctggggctgataattctgagtactttggatcattctgtttttgcaaaggtataaaataccagacttggcttaacctccaaggtactgccactctgtccttgacatccttctccctttctttgcattcaatagtgttcatttagttgaatctcacaatctaggtttcagctcctagattctgtaacaccataagaaaatggtgtcacagatttaagtaacgacccagaccctattagtcagttattgggaaagccgaggttgggaaccagatctcctaagcatcttggctgtactcatcctatttgaggaccctgtttcattggcagacctagaataattggtttacttactcaatcatcactcctattttctgtgctccctctacatttggctacttatggaattatttttgttggcataatggatagctttattatgagcccacaactttttggacataaataaatgaatagagactcactagcaatactgtgtatgcttaaaatgttcactgttcttccgtattatataaactagaaagccatgaaccactagttcatacaatagcttttatatattgcgtagaatgttacgtataaatagtcgtattcattagaccttgcctcagtatttccgccacctgatatagtacctggcacaggtagggtgtccataattttgagttggattgtattggattagattagttgcaaattaaattattgaaagtggctctaatatctttcaactctattctgtaatttagatctgtaaactagattctgtaatttatttaacaccactgcccagatatgtgtttagacaaaggcacaactgttgaaagacactttattaggcccagtgtctatctcttagtctgaaagatctacgtaatcaggtagaccagttctgggaactaagacctcctgagatgttgcagatgggattggttcgccagcctgaagcgaggagcatcatgtttcctctcttgtctcaacacttggaaggtctagagagtcccagcatatgaaagcagatgtcttggaggtattcacaaatggggcagtgctggttcaaaccagtaaacaaactttctttaattgtaaaaaattgtaaaaaaaaaacaacaacttgttttaattgtaaaactcaaaataaagagcattgatatctccctagagatgccatttaatcacattgttcttctgattgtcaggtccccagtggaggttactagagcacttaatttccttagaacaggtgtttttgccataaggattatgttggcatccagtgtctccgatagattttgtctggcagttaaggcataaagtgatagttatttctttatgtttaatactgataatttttcatagatacttctggagcttctagttttcacttcatttgtgtgaggggggattttttatttctatatttttgtaacctccaaaacgccagacatatgtatttttttcagtctatttattagcactaatttaaagttatacacaatgcattgttttacagaacattcatctttagtctcctgcgattgctgctcaataacatgtcatgagaaaagttcagatttgcaaagcatttgtcatttcctcctgataattgctaatttatttagtaaccatttgtttttaacacctttgtctgccaacctatagatttatgtacagatcagctccatacatacataaatgttcatattagtactaaaagtaggttgaagtatacctttggtacttagctcttctagcgaaagtcctaacctaacccaaactcttttgtcttttcttaaatgtatcaatacttatacaaggataaatgtttttatgaaaaattttctggccgggcactgtggctcatgcctgtaatctcaacactttggaaggtcaaggtaggaggatcactttgggccaggagttcaagaccagcttgggcaacatagctagaccccatctctacaaaaaaaatttaaaaataaaatttctattaattcttaactaaaactctggaacatttaagctagataacaatcatccatgttaactgtttcagggatttcccacatgagtaggtgagaataatgataccaatttgaatcatggtttcataaaatacactttttttttcagttagactaaactttcttttttgtttgttttgagacagtctcgctctgacgcccaggctggagtacagtggcgcgatctcggctcactgcaagctccgcctcctaggttcacgccattctcctgcctcagcctcccaagtagctgggactacaggcgcccgccaccacgcccggctattgttttgtactttcagtagagacggggtttcactgtgttagccaggatggtctcgatctcctgacctcgtgatccgcccacctcggcctcccaaagtgctgggattacaggtgtaagccaccgtgcttggcccagttagactaaactttctatcttgaaagagtgaagtaaatgttttgccttaattattaatacgtgtttattttatttcagtggtacaggcatggatgggaagaaatgcagcgtatggatgttcctacctcttgtatttactttgtttacttcagctggattgtggatagtgtgagtatttgctcatttaattatttaaggattcaggtgcaatgtagatacaaatgtaaaccttaatagtatatggcagccgggcacggtggctcatgcctgtaatctcagcactttgggaggccgagtcaggcagatcacttgaggtcaggagtttgagacccttgccaacatggggaaaccctgtctctactaaaaatacagaagttagccgggtgtgatggcacacgcctgtaatcccagctactcggggggctgaggcacaagaatcgcttgaaccctggaggcagaggttgcattgagctgagattgcgccactgcactccagactgggcaagagagcaagactgtccccacccccccaaaaaatagtagatggcatatctttatgactgtatttataaatacttgaaaataatatattttactaattcaaccttgctaaagtcctcatttcttttcccattttctattaaccaaagtaagtaacaagagtgagtaataattatgcaaagccggtggtgaagaatactagtttattttgtgttcatgtgttcttgttgtaatgaacattttgtaaacaggttatatgaattaattatttgcaagattttcgaatttgacactaacatgccatgggttccgtctgcagtccagttcatagtccagttattcatgattgggtctgatatgtttttgttttttgttttttgtttttgttttttttttgagacggagtcttgctctgttgccaggctgaagtgcagtggcatgatcttggctcactgcaagctctgcctcctgggttcacgccattctcccgcctcagcctcccaagtagatgggactacaggcgcccaccaccacacccagttaattttttgtatttttagtagagtcggggtttcaccatgttagccaggatggtctcgatctcctgacctcgtgatctgcccgcctcggcctcccaaagtgctgggattacaggcgtgagccactgcgcccggcctgatatgtttataaaatgaatatcattacattggaagtcctggcttaccacagaacgttcccacacttgcttattttaggtaatattcactttaagaaaattattttagtttctcaaagtttgttaggaaaggtaggacacatattcccgagaagttagaaactgaaccctaattttagtttgctcaaagttgtaagttctatttccttgttttctagtttccagtttataagcatggccattactttggggatgttttgaaaattaaggaaatattactaataatgacatttgagcttcaaagaactagatgatctatgggtaaagaattgtaaaagagcatttctcagttagaaaaaatgaatatgaattagtgcagttagtttaataaaactgggaaacaaatgattcttttttccaatttctttgttctataaacttattcttttttgatagatacttcatagctgtggaagatgacaaaattttaccattaaattcagctgaaaggtaaagtttatctgtgggtaattcgttgttcatcaagagatttagcaaaaactttcccactgggaaggttaaactgcacaaatgacagtgctttaacctgagcttctgtgttttttttttttattatccaggaaacctggtgtgaagcatgcaccatatataaggtaacccagcaattctcttctgtcctgtgggaccgtaggaaaagttaggaggattatagattttgatatagtaactataaaacatttcatctttttcaagcattgcaggtgatgatcctcctgcaagctgtgtgtttagtcaagttatgaacatggcagccttcctaggtaagaagagggtaaagaacgctttatgtgctttggtacatttcttttgtattttaaattctcccaaacccttgtcaaaacaatggggggcttatttgatcatttagtatcatacgatgtcaatatgctgaagccagctctttgtcttaaaggtctttttctctcgtacatccatttacgttcaccctgctgtccttacattttctcttccctttaccatctttatcatttcagatactcttgacttgatctattttgctgcataaaataatatatttcatgatataaaatcctgtatgagaatgtaatattgtataatacatttgctttgaaaagaatgctttatttattccttcactagcaaagatgaaaaaaatgcatgggctttgtgatatttgttgatgtgtgtagatactgtctttaaacctaaaggtcaacatcagcattaggattacactctctcctgtgcctatagacatagtaagctggcaaatggagaagtaagcttaaaaagaagaaacctttagtactcatatctagccccagttcctttttctttggggcccaagaccctcctgtaatattctgtccctctgtgagtgcgtccatgaccctgcatagtcctccagagatggtgggaaccagccatgcactctatcctttttctaatctaccttgtataccatctcctcagtgccaggctttcccagtgtctctccaagagtcaactggctatcactgtcaggatgatgttaggatggaccaaagacagcccatccttcccacaatggtgttctggaagtggttcttttgatggtgagactttcactccaagtaagaggtagtattattactgagggaatattcaacctttgtgggacgtgtctcccaaagaagtaacctgttatttcacctccacccctcaaaattcctactcgctcttaatgtattcttttttaatatttgctataagaatgggaagacctttagaagtcagtggaaaatcaagggagacaggtggtccaacatgcaacacaggcagaaacttagctggttcagaaagcccagaacatgagaaacatggagaatgtttcccgtcaggctcatcaggcctctcttgaacctgaagcttcaaaaagaagtacgctggggagcttctgtgcagttagcaagattcttccctggagctaaccacctttccatcaaagctctccccagccatccccaaagcgtatcccatttgccaaagcaggaggtgtccggaaagcctgggctgctacactaccactaaggagaaagttaaatataccctgatgctggggttgccgagtctttaaaaaagctctcctctttatgcccctggcagtcaggacttccacatcctagatattcacaagtatcaagaaggatggcacctgcagtatctggtgcacctgtgggcaccagggccagtcctgggcagtcaggtttggttgtcactgctttcagcctcagagctgccaggagctttatacgtgctccttttttctactcttgacaccattcttctgaaaagacctaataaacttattcatcccaagacataaatagctgctaaggaacatttgcatttgcatttgcatttgcatttaacagagcacaaagccccaagagtgaaccttgaatggtagggtcagggacctttcctggcccctctgccattatagcacgtaggcctgcaggctgccatctattcgtatgctcttcccacagggggcaacaacgattaatagccatcatttctattccaggaacaatgctaagtgctttgcaaatactacctcatttaagcgtgatactcaagcctgaaatataaaaaagctgtcaccagctgtctgtcctccactgggctttaaacaaaccagtgagcacattggaagccacatattgtttcctttgtatgcttaagacaaattgatatttcccagtggtctttaagtgtatacttttttaaaacccagtttgtatagctcacaagtttatccagttataaggcttatgattgactaattacaaaagcatttccaaaagcaaagcaatgaaagcaagatcccctcttccagatgatatttgtcatcatcttattctccagtccttcctgctccaccaagaagcaattaagcttttgctagctcttgctcgaaggtattacaacatccagtgtttattctgtattatctttcatcattttgagtgccatctggtagacataaaattgattaagattattgttcaatgggagcaaaccaacaagtatttatttatcaactctgagagtgaaaaagaatcagtttactaatgattcctcctctaaactgtggataccttcatctccccaggcctgcccttgttagacttcagactattattttagtctacataactgactttaagaaataacccacaccgcctattagtcactgcttttcagcagccttatagattatactttacaatctaaaaatgagtcagtgtagcatgtattaaaattagcaaagatattttatcttttttgacagactaatcaaagattgaatgctcaattattttctttagagaattagttgtgctttttgtcttgaaactgcatttctttccacggggtaggagagaaaaagacctaagacaaatttcttcaaaggaatataattttctgccctggggaggttgtgaggataaagctaatagctgaatgatgtcagtcaccgaatagcagccactctccctccttcaggcaaaacatattgacagttgtgttctaccgcagtcataaataggaatcattgatgcataaagagtcaaacaaaacaaaacaaaaatttggccaggtaccagtttagaactgcaaggaagggacgttatttgagtttcgaactttaaaaacccagtcagactcagaatttaaaatgtaattagaaaaatcagccattattctatttgtgctttttttttttttttttttttttttggagacggagtctctgtcacccaggctggagtgcaatggcacaatcttggcccaccacaacttccgcttcccaggttcaagcgattctcctgcctcagcctcccgagcagctgggattacaggcatgtgccaccacgcctggctaattttttgtatttctagtagagatggggtttctccatgttggtcaggctggtcacgaactcttgacctcaggtgatccaccagcctcggcctcccaaagtgctgggattataggcatgagccaccgcgcccggcctctatttgtgctcttttgaaaatagacaggaaaattaagtaggggacacctgtatggcaaaggactgtttcaaataccaaaaccacagaaggatgagtttttaaaatcttttctgaaactgttagtgaaatctaaaaattttaatgaaacaaaaaaatatatctattgatcagaacgtgaatgtggtaaaagttagcatatataaagatggctttgaaatggcccgtaagtctttttcaggaaggtataattaaatcactacttggttgaaaatggacttcataacagtccaaatctgcctccattcatacctaagtgttagtaaaactgttataggggcagaatcttttattagatccatcattctaaaaattcagctagaatctattttaaaaggaaagtatgcctcccctgatctgattaataatggagttaagaggtaaaaaagggcaaagtgtggtgtttagaatgcaattctggaagctaggagtgttgggttaaatccctgtcttcaaataggtttctgtttcctgctgaatttcataatttgttcatgataagatgacttaccattcatattacaaataggacagctagcaacgcagggaccagaagatgttgcatgtcctgtgtttactggacagaaatagataatgaagagagcagccaacaactctgttcccctgggcataaaggaacaaactctttgactgggtgggtcaacatgaagagccatttcaggaactgggtttagggcttaggtcaagttccagcaccatcctatcccacaaaatgaccagcagagagttctcagagtaatacttttcagtggtcatttaaaaaaaaattagccagccaggcgcggtggctcactgtagtcccagcactttgggaggccaaggcaggcagatcacaaggtcagtagatagagaccatcctggccaacatggcgaaactccatctgtactaaaaatacaaaaacattagcttggcttggtggcgtgcacctgtagtcccagctgctcaggaggctgaggcaggagaatcgcttaaacccaggaggcggaggtcgcagtgagccaagtttgcgccactgcactccagcctggcaacagagagggactctgtctatattataggctcatgcctataatcccagcactttgggaggctgaggtgggcagatcacctgaggtcaggagttcaagaccagcctgaccaatatggtgaaaccctgtctctactaaaaatacaaaaattagctgggtgtggtggcatgggcctgtagtcccagctacttgggaggctgaggcaggagaaccgcttgaacccaggaggtggaggtttcagggagctgagattatgtcactgcactccagcctgagcaacagagtaagactctgtttaaaaaaaaaaaaaaattaagtgtgctgtcttagtatcttgttattatgtcctaacagccatacacaacttattagaaggatatcctgtagtgcctgtgttgagtctctaggcttaatctaatggcttctttagctgatgatcacttcgtgatggagtgctgtgtgttgaattactcctctcccctacttcctcctcctactcctatcctaaaattaataagacgttgtgcctatttttcatcctctaggattgttattgtcattgttaaagacttcggatataactcctacctaggtccctcaaaccaatagtttgagaaactactgtcaactcaggtataatgtattaattttctgatcaatagtcggtactagctgaagcatatactgaaagatatatcagggctgaacaatttgagatttttataaatcatgatttatctctattttgtttctaaaatccaaatattaatcaagttttataccactctttgatcagaagtacttagaactaaaagtcaacttatcaagcttaaagccatagggttacactatgaaatttaacatactcgagaaatgcaaatttatggatagattttctttattaatgtctactaataatggcctgtaatcaaagtaaaacctttagcaaataattaccaacttaattgctgtacaaatagggtaattcttgaatttctaattgtctttcctgctgaaccttaacgtcaaaataaattatcttagtagtaagtttgtttccttacatgtagatataatttacattaatcgaaagtgatttttcatcatttatagactaacctctcccaactcttcgtataaatatgaaaatacctctgcactaggcaaaaaaaaggtcatccttagattagggccttgagtatggactatcccaaggttactattagaagtcagatttgaaatctaagtaacttccctcattctctcttcaaattctcagataccaatttgcttcaaaagatagagtggacatttaaaatgagtaattaatattattttcaggaattgagttttcttgatatactaggtacgatttttagtacataccaaatccctcaatctgctatgttaaaatacagatttcataagtatgaatattgtcacttctctaatttggattaactatctttgttgtttgacagtgaacacctccaagtagaatcgaagggaagtgagagtaaaaccagtaataaaggaacttgtacattttccattatctttcttcccaggaatggtttatggcgctggcaccagcaattttgtctagatgtggtaaccttgtcttcttcccattatgttcctgccctatcattattttccacactgttctaagctaaaggatgcctgagtcggtctgtctttatcccatcttatttgttgtgtgccaagcctctgcagtgctctcctaagccagtctgtcctgtgctgaccttgtttttgaaaactctgagaacaacactattcatagtcctatcatccttgcctcacccaagtaacatacagccctgttgcctcgagtcctctctgcctctctgctttccccagattgagtataataaaacatctaaataatcataagcattgcatggaaagtttctttgaaaaattgtggatcattccagagatgtaaaatgtgctgtggtgaaaagtttaattttgcacattgcggctttagaattctgcctcttacctaagaaaatagtgcagcataaaaaaataataataatagaattctgcctcacagtctaggtgtgtgatttaatttcttccattttaagactttgctttattcctagcccttgtggtagctgttctgcgcttcatacaactgaaaccgaaggttttaaacccgtggctgaatattagtggattggtggctctgtgtctggcttccttcggaatgaccttacttggtaattttcaggtacttgatttggcctttttcacctccctctgacactggtaagaccttcacttctgagactatcaaagctattgaggtataatcaccatatggcccatataattctgcacaaacctttttttaaaaactaggactcttttccatggcaactcggagctgttcagctgcttcaagatgaagctgaacagctccttcctagccattggctgccagaaactcattaaagtggaagatgaacgcaaacttcgtactttttatgagaagcatatggccacagaaattgctgcttatgctctgggtgaagaatggaagggttatgtggtccgaatcagtggtgggaacaacaaacaaggtttcttgtttgttggtgggaacaacaagcagggtatcttgacccatggccatgcccgcctgcctgttacattcctgttatatatagaccaaggaaagctggagaaagaaagagaaaattagttcgtggttgcactgtggatgccaatctgagcattctcaactttgttattgtgaaaaaaaagagagaaggctatacctggactgactgatactagggtgcctcgtcacctggggcctaaaagagctagcagaatccgcaaacttttcttttttgagacggagtctcgctctgtcgcccaggttttagcgcagtggcgagatctcagcttactgcaacctccgcctcccgggttcaagtaattctcccgcctcagcctcctgagtagctgggaccacggggaatgccaccacacccagctaaatttttgtatttttagtagagacggagtttcaccttgttagccaggatggtcttgatctcctgacctcgcgatctgcccgcctcggcctcccaagttgctgggattacaggcctgagccaccgcgcctggtcaaacttttcagtgtctctaaagaagatgatgtctgccagtatgttgtaagaaagcccttaaacaaagaaggtaagaaacctaggaccaaagcacccaagattcagcatcttgttactccacgtgtcctgcagcacaaacagcagcctattgctctgaagaagcagtgtactaagaaaaacagggaagaggctgcagaatatgctaaactttcggccaagagaatgaaggaggctaaagagaagcgcaaggaacaagttgtgaagagacgcagactttcctctctgcgagcttctgcttctaagtctgaatctagtcaggaaaaagattttttgagtaacaaataagatcagactcacaaaaaaaaaaaaaaaaaaaattaggaacattggttcctaacatgcacaggttctccagagttcagcctttctagtctctcagcctggtcttcctgagttctcttaaatgtgcgagggtgttacatatgcctatgaaatacagtgtggctactgagaaaagcagctactagaacagctgtatattttctacagaggatttccaagtggtttatacttttttttcgtaacaaattggatcctaatgtacctttctagcaaaccagtaggatcattacctttctataactaaacaccaaacatccttactggataaaaggatgcttttcagattagcaagtttatgtggaagtcaagtttgaaagcccagaatttctccagaacacttatgacttgtataaagatatgctactcctaactcttcttcctagaaattcagaagcccaaggtcacaacctttaagcataattttccttgccaataccattacccagctcttgacaagaatgactttatttgtaaaatagacaaggaaacctctgtactatgacagtggttgactgatttccctccctccccaccaacctccaacctatgctatttatattacagctagaaacttcctccttgagggcaaacactgatcctgacactcttccccctgtctgttgaatgacatcgcaaatggcataggcattcaagacctcagcattctatcgttcatttagtaatgttcctaatgaaaatagtagtggattttctaaggccatttcttgtcctaccctcagcactgctgattcattaaaccaggatcactcattcccaaagacttcccctggcacatagtagcaacccagtaaatattttttgcttggtgagttataaatgggcaatcccaccaattcctctaactattctatctcccatctatatccagctaggcaaccagaaagctgcattcttagaatatattggctgaggcagtgattaccaggagaatatttgagagtttatcctgttaagatccaaaatgtaaggcatggggcattttaactgaaattttgttgggagtctttcccttacttgctggcctgtgctgagggtacaggcatgttgtaaagtgctcagtcactattgtttctctcgaccagggctttgatgagttactaagaagaacacattttgttctttacaaaagtcctagaaaaatccccaagattgggtggctttggtgaaccacacatactcaagaccatgaatgttgacactacttatgaagaacgtttgccggaatataacagaatacatgagaaatgacaaattagtttcccatggagaaaccaggtggctagtatatgggacggcagacagacttttcaatctatccctcattataatttttttaagtttaactatgtaactatattatcttttttaaagattaataataaattaatagatttatatagcatggaaaaccaattttctagaagcaaaatttgatttcagatatcattattttaaataattttgaaaatatgtcttttgaactgtgagagaaaacatggcttcttccaaaaaagaggcaaaaatcctacagccaaaaacaatagaaaaaattgtaaaaggaaagtaacattgatttgatgcaacccttatgaacaacaatgtcaaacaacaaaacatctgaaggcaatagcaattcaaaaaaataatactttcacaatgggtttaaaagccatgtctttaacaatagattttactttcttatatgtgcaattaaaaaatatatgttgaagaaaaggaaaaggaagaaaattttttaaaaatatgtaaatacatagtgaacttttatcataccaccgtactctagcctgggcaacaaagcaagaccccatctcaaatacatatatatatatatatatatatatatatatatatacacaaacatatacgctaggtttgatgaagatgtggatatggatagactttgttgttttttttttttttttttggagaagtggatagtcttggtgaagtatgattgactgaaaaaattatgatctaatggtgataatctgaaaaatatatatatttacatatgtatagatgtatatatacacatgaaaatacaaaaagagttttaagtgatggatatatattttaaacatcagttggtaatgatttggggagtttacatctataaccgccaatggcaataacctaaatgggagtcctctataaaagccttgagtatgaatcttcaagtactgttgtcctactatgggtctctatatgtggcaaaagctcataggtgacagtttttcttattactatgggaaaataaaactaaaaaaattctcattaacaatgaattagggccgggtgtgttggctcatgcctgtaatcccagcactttgggaggctgaggcgggtggatcatctgaggttgggagtttgagatcagcctggtcaacatggtgaaaccccgtttctactaaaatacaaaaattagctgggcatgggggcatatgcctgtaatcccagctacttgggaggctgagacatgagaatcgcttgaactcaggagtctgaggttgcagtgagtggagatcgcactactgcactccagcctgggtgacagagtgagactctgtctcaaacaaacaaacaacaacaacaacaacaaaaaacaattatttaggccaggcaccatggtggctcacgcctgtaatcccagcactttgggaggctgaggcagaagaatcgcttgaacccaggaaacagagattgcagtgaactgagtgccactgcactccagcctgggcgacagagcactccgtctcaaaaaaaaaaaccaaaaaaaaaaacaagaattagtcacattacatagacgggccagttttgcaagcgtgaagaacagagcttaaagggttttagttgtctgtgccaattaaatattgacttgcctagaattggctgtcctccatcagtaaatatatattggccaggattgatggctcacgcctgtaatctcagcactttgggaggccgaggcgggaggattacttgagctcagaagttcatgaccagtctgggcaacatagggagacaccatctctataaaaataaaaaaaataaaaaattagcgctctcctcctgctgccaaaggtgctgaaaggaaagaaggccaaagtaaagaaggtggctccggcccctgctgtcatgaagaagcaggaggccaagaaagtggtgaatccctggtttgagaaaaggcctaagaattttggcattggacaggacatccagcccaaaagtgacctcactcgctttgtgaaattgccccgctatatcaggttgcagtggcagacagccatcctctataagcggctgcaattaacctctgtaagtgctttctgcaattaaccagttcacccaggccctggatgccaagcagctactcagctgcttaagctagcccacaggtacagaccagagacaaagcaagagaagaagcagaagctgttggcccaggctgagaagaaagctgcctgcaaagaggacgtccccactaagagaccacctgcccttcgagtaggagttaacactgtcaccaccttggtggaaaacaaaaaggctcagctggtggtgattgcacacgatgtggatcccatcgagctagctgtcttcctgcctgccctgtgtcgtaaaatgggggtctcttgctgcattatcaagaggaaggcaagactgggacgtctagtccacaggaagacctgcaccactgttgtcttcacacaggttaacttggaagacaaaggagctttggctaagcgggtggaagctatcaggaccaattacaaaaacagatccgatgagatccgccatcactggggaggcaatgtcctgggtcccaagtctgtggctcacattgctaagctcaaaaaggcaaaggctaaagaacttgccaccaagctgggttaaatatacactgttgagttttctgtacttaaaaaacaattaaagtaatacaaattttccttcaaaacaaacaaattagccaggcatggtggcatgtacctgtggtcccagctactccagaggctgaggtgggaggatcgctttgagccagggagccgtgatcacgccactgtattttagcctgggagacagagtaaagaccctgtctcaaaacaaacaaacaaaccaaaacaaaaacaaacaaacaaaaaaaaccatgtccaaattcctggtctaattttcttatcctggaaaagtttggggtgtatgcttgtagaaacatttctttttctgtaactctccttctgttttcttttactttttctacacaaatgtttttaagggttgggggtattatttatttccttcatcccctcagagttcaaaccatttgagaatagaacgaagagctaatctttctgcaatctatcatcccattattgggatatttcttttcctatcttttcccctcatatattcattccttcaacttgcctgtcttctttgctgaatgggccttcatgtgtcattatccattcatccctaagctcacaaatgatgaagaaatccataacgtcggaacttccttgacctttggatttggcacattgacctgctggatccaggctgcgctgacactcaaggtcaacatcaagaatgaaggacggagagttggaattccacgggttattctgtcggcatctatcactctctgtgtggtcctctgtatcctttgaacgtgaaaagcttcttttgccagtaagatgaaaacaagtaagttgtctctgtagaagaacccagtgggttaggatattctgccagatcttctcagaatcttaaggcaaaggtaaacaggtataaaaacaaaaaccctcagaccaatttttcatgccaaaggggagatggagaaataaaaataaaacaaggtctgccctctccagattgtttcaatctgcaggaatggtgtcatacattctcatttcactaatgatgtaaaagttcttatttgtgaaaatcagagaatgcacagccaaaagagaattgccatttttttcctccagcttaaaaaaatgcatttgtgactttattaatggccctgttatttcatttcatttattagctctgaaatgaatttcagaggaccaatacatttatatatttcaggaaaataatgaagcttttctggaagacaaattcaagcactagattaaggctgcatgtgtagttttcctccaatatttgaggttttggggtgctattcatttcccttcctccgctcagagtttgaaccaattgagaatagatgctaggagccaggtggggatgaagaaatcagcctttatcctagtaaacctggaaaggaaaatgctgcaggtctcctctctcacaccttggaattcaacttaaccacccagtaacaagcagagaaaccagggaaaggcagaggagagcacctcactccgcttagccccacacagatcccagagagagtctagcttaggatggagtgcagtggcctcacctactggtagtgtggcccaatagaagcctgccagttcccatcccaccaatcagatcagtcactcattccatggagtggagtaatcagaagtgttcaacacttggggaggcagaggcaggaagatcacttgaagtcaggagctcaagatccacctggacaacaaagggagaccctgtctctacaaaaaaaaaaaaaaaaaaaatctaaaaatccgctgggtgttgtggcgagcacctgtaatcccagctactggggaggctgaggtgggctggcttgagcccaggagtttaaggctgcagcgagctaagatcgactctgtctctaacaataaataaataaataataaaggcctggtgccgtggctcatgctgtaatcctagcactttgggaggctgaggcaggaggattgcttaagcccaggagttcaagaccagcctgggcaagatagcaaaacctggtctctataaaaatttgttttagaaaaattagcagggtgtggtggtgtgcacctgtagtccaagctacttgggaggcttgcggggaggatcacttgatcccaggaatttgaggctgcagtgagttgtgatcatgccactgcaatccagcctgggtgacagagtgagaccctgactcaaaaaataaaataaaataaaaggcaaaaataaaagaagtgttcactccagtaaggccctcctcagaaaaccagagaaaggaatcaaggttcctaaagggtagattgtacagaaaatgcaattacacatcttcagtcataataatcaccaatttttagacagcgtgctaggcattattctaagtactttaaatgtatcaactctttttatcctcacttcacatgtaagaacagtgaatcatggagaagtttaatttgcgcaagatcacacagataatgcgtggtggatcgagatttaaactcaggctcagctcttcactcttaaccacttcagaccccaccttagagaaagtagctttagaatgaaacaatggcattcgcagcaacctggttggaattggagaccattattctaagtgaagtaactcaggaatgaaaaaccaaacatcctgtgttctcactcataagtgggagctaagctgtgaggacacaaaggcataagaatgacacagtggactttggggactcaggggaaaggatgggagggggatgagggataaaagactacaaattgggtgcactatacactgcttgggtggtgggtgcaccaaaatcccagaaatcatcactaaagaacttattcatgcaaccaaacaccacctgttccccaaaatcctattgaaatataaataaataaataaatataaataaaaagttcaaaatagctagaaagaaataaagtatatcaattcaaagaaagagagagaaagtagctttaaaatatgaatagaagcagaccctaagatgagggggggaaagaataaaatatgaaaacacacacagttcagagcccattctctagttagtggagtatttggactatttattttttcttcattcacaaattcctgttccaccattttgctgattttccaaagttctacagtcacattagatagagaacatttaaggacttaagttcaagccaaaaaacttggttcttgctagcaacctaataaatactttatgaacaaaaagatcaaaactctgccaatataagataaaaggagatatgctttctccattaatttaagtaataagttaatattgctttggcaatattttgcatccttgttcaaaagagtgtgcagactttaaatcactccgagatgttttttgtgatttaagacagggtctcattctgttgcctaggctggagtgcaggggcatgatattggctcactgcaacctccacctcctgggttcaagccatcctcccatctcagcctagagagtagctgggattacaggcacacaccaaaacacccggctaatttttgttgttttaatagagacgtggttttgccatgttgcccaggctggtctcgaactactgggctcaagtgatacacactcctcggcctcccaaagtgttgggattacaggcatgagccaccttgtccagcctatcccaagttttgagctttcaccaaatgattctgattcatgctctttctgaacacgtggaatcttttttttttctttggttctcaggtgaatggatgaaggcccagttagcaaagcaaagtttggctgaagtaatttcacattcttgctctctgaaaatttcccgatttcaggtctaatttcagaagatagaactaattctaaggagacatttctgatctttctaagtaaatgcatctagttcctcagacacttggcctttcactaaagctgctatgaactttttacccttcttcccagctcctccttccatttattctgttgtgtatatacagatacagatacacacaacacacacacatacacacactccatatatatatccaggcataagagtctcatttgtttttctttttttaatgatggggccttgccgtcaccctagctagagagcagtggtgcaattgtagctcactgcagcctcaaactcctgggctcaagtgatcttcccacctcagcattccaaagcactgggattacaggcatgagctaccccacctggcctcatctgtttatcatacaagtttagacgtgatacgaggaatgaaactggtctatacagtattgtctgaaagacaatagtgaaaattagaagagacaggccagccactcagacacggttagtagcactgcagagccaaacacaacttacatgtcggcagttagtaatttgatatgttcaaaattatttctgcagatataacgataactatgaattcatagtcatttgcagtgctttcttcttttttttttttttttttttttttttttaagatggagtctcgctctgtccaccagcctggagtgcagtggccggtcttggctcaccatttgcagtgatttttttttaaaatagcttaatttttctggcaaactaattactttggaagtgtaatccttttcctaatctcccagttttgtaagcagctacagagtacagctattgaatacatggcgcaggagttagagtgcttgtttgagcccagctcagccaattaatacctgtgtgacctcaggcaagttacttacccatttggtctcagtttccctatttttaaacaaactgacaattatttggataagagagtatttaagggcaaatagaacatgtaaaaatgagaaacaaaaacaatgataataggattgttgtgaggattaagtgatactatccatgaaagcacctaaaagcatgtctaccaccaaatatgagcccaataatgttaacttattattcatatagattttcgtgttcaacaagctctagcaggctaccagtttttctagtgatgaggaaagccagacttttcctataatctgtctctgccctgaaaagattccagttttaatgtggctgatgagggtattttccttgactgcttctccccagacttcatcctcatggcccaaagcatccacatgtatgcagccagggtccagtggggcctggtcatgtgcttcctgtcttattttggcacctttgccgtggagttccggcattaccgctatgagattgtttgctctgagtaccaggagaatttcctaagcttctcagaaagcctgtcagaagcttctgaatatcagactgaccaggtgtaaaccatcagtttttccttgctggtgaggtgggtgtgacagtgggggaggggccagtaggacacactcacaggacttgacatagaacctcatttcacacacacacacacacacacattcatggccacatttgccaaatgagcttttcagggcgagttatttctttaatgaaaaagcacaagcccttatgtgtcgaaatacacgctgttacactgaaaatatatgcacgacagagcaagaagcttgtgcatgatcacttcttatccgtccccttcccagcactccctcctcttcccattctctccacatgtctcaagcaccctaccgagtagggcaggccaaatgttccttgggagtaatgccaactcccgacgttgccttcaggtccaaagggcttggaaccagctcgtgaggaagttctgaatctggcactaatattcttgagtggataatagtgtatcatagaataggacggaaattgtattgagatgtgaccctgtgtcgcctgtggaaaggcatagtgagaagaactttcccacgaaagcccccttcatcgttgttcagtggtcggctgtgtggatcccaggagagacatatgccacagactgtgagagcaaagcccgccgctgtgatctggacttgatgcactgtgactgagaatgatttccaaatgtgaatatgtgtagggacgtggtctatcaggcctggaacaagatgggggcagtgaaggtatggtttagtgtttgctttcatagtatgccatgtacaatgttttatatttcatagtttcttttaagtaactaccatgagtctctctaagcctcatggacaaagatgtagaccaaatgcaagagctgagcttgctttgggttcaaccatgatcaaagaaaaactgaggtcacctgcaggcttacgtgggaagct

SEQ ID NO: 311 - DNA, 5343 bp, Homo sapiens
agttccggtccggcagagatcgcggagagacgcagaacgcagcccgctcctccagggccctccaggccctccggccccgggccggcgggtgaactggggggccccgggacaggccgagccctctgccctgcagataacggaggcctctgctgtggctgcccactggctgtgcccgcccactggctgtgcccagaccttgaagccgcagcgaacctctctttcccaccccacctcggtgactaatggcggccgtggcgtctcccagcccggaccccgccggcacccgggtctcccgacccaagcctcgacgaaacccccgcagagccgccgggacgcagcgcctttgggcggcgctgggcgtggtgggccgggaagtatggcggcagctcgaacgccgcgcggcggaggccattaaggcgtggacggcccgggaaggcggcctagggacgcaagcaggctcggccgcctctttaggccacggagccgcgcagatccggttcccgggtgaccactctgtcgccattgggcgagacctacctagtcctgacgacaacggacaaaggccttaaggggcctggaaggtgagcgaagtcccgaacgacgacgggtggaacggttagcggccatcgggcggttggtcttcattctaccagactttgctgtcggaagagagaaatggtagaatgacaggccacgtttggcccgttggaaatgcccaccaccctctgggaagatttactggccgtttatggaaggcctgtgtatataatatgaaaaagctgctctcaactccaccccaaccttttaatagaaaacatttgtcacatctagcccttctagatggaaagaggttgccgacgtatgataaaatagagttagaaagttacacatcttgtaaattctcatttgtttaaaagaaatcatagaaaatacatgtcttctggagatgacttttggaaatggagttgttaagacggcctctggaagcgatacgtccacgtttgttaagtgggttagatgacatggagctggaagacctgagaaggaagagaagaaggttctatgctagactggtcatatttagaagacattttcatattctatccattgttttgtgtgcattttattcctcactactgtgtatatagttgacaatgctaagcttttttgaaatgtctcttctttttagatgttctgaagtgcctgatatgttaaaattagaggtagcaaaatcacattttgtaaatacctttttgttacaattcataggaaatatttttgggggggaatggccaaatcacctgttgagtaatactcattgtgtttgtgcagtggttcaggggaggagagaggagggggaggtgcagagagctctatgccatcctgtttacagcgaggcaagatgaatcattatgtctgtgcattttgttttacttatctgtgtatatagtgtacataaaggacagacgagtcctaattgacaacatctagtctttctggatgttaaagaggttgccagtgtatgacaaaagtagagttagtaaactaatatattttgtacattttgttttacaagtcctaggaaagattgtcttctgaaaatttgatgtcttctgggttgatggagatgggaagggttctaggccagaatgttcacatttggaagactctttcaaattataactgttgttacatgtttgcagtttattcaagactgctgtatacatagtagacaaattaactccttacttgaaacatctagtctatctagatgtttagaagtgcccgatgtatgttaaatgtataggtagtaaaataccactttgtaaatatctttttgctaaaattcataggaaatgcttttggaaattgaattgtgaagccacctttgtgaacagtatagtaatgtctatacttgttcaatagtttagaggaggtaggagggaagaaattgcaaaaggtaatattactagtgtgttcatacttggacattttcagacaccatttttctatatgttttgtgcattttgttttgctctgtatatagtatatataatggacaaatagtcctaatttttcaacatctagtctctagatgttaaagaggttgccagtgtatgacaaaggagtaaaattagcatattttgtacactttgtgttgaaattcgtaggaaaacttgtcttctgtaaagacttttgcataggaatttgtttgaccatctctaagcattacacgtgcctgtacttgtccactggattgaaggcagagaaggaagggaggagggaatgattcaaggccaaaatggccacatttagaagatacctcagatgataaccattgttatgtgtgtgcaattttatttaacagtgctgtgtatgtggtggacaagttatatgaaatatctagtctttctagatatttggaagtgcttgatgtatttaaaagtggtagtagaataacactttgtaaatagcttttaaaaactgatgggaaatgctgtttggaagtggaattgttgaaccacctgggaggtgggagggaagaaattgcaaatggtgttttgccattgtttattagaaaatttcagcttaatccattgtgtatatgttacatgcatttcatttaactttgctatactgtatatattgtatatataacggacaaattagtcccgattttataatatctagtctctagatattaaagaggttgccaatgtatgacagaagtagagttagtaaactaacacattttgtacactttgttaaaatttgtagaaaggctgtcttctgaaaaggacttttggaagtgagataacatcagctctaagtgacacgtgcctatatccatcaggttggtggtggagaggagttggaaggaatgaagggttctagaccagaatgttcgtatttagaagacactatcagatataaccattgttacatgtgtgtagtttattcaaccctactgtgtatatagcggacaaacttaagtccttatttgaaacatctagtctttctagatgtttagaagtgcacaaagtatgttaaaagtagaggtagtaaataacacattttgtagctatccttttgatatgaaatattgtcttggaaattgatcaattctctgagcagtacccattttgatatttgtgctggttcagggggaaggaggagcacaaagtgcaaagggctttctaccagtgtccagtgtgtttatgaggaggcacattgaccattgtcccttatgtctgcattttcatttactgtgctgtgtatatagtgtatataagcggacataggagtcctaatttacgtctagtcgatgttaaaaaggttgccagtatatgacaaaagtagaattagtaaactactacattgagtacactttgtgttaaaattcatagggaagacttcttaaaaacaagtgaaattgttaaaaccccccctaagcattacagatggcttatagctgtccacggggttggtagaggtgggaaagggaagggttctaggccagaatgttcctatttagaagacactcaaattacagtctgtgttatgtatgtataccatttattcaatgctactgtgtatataatggaaaacttaagtccagtttgaaacatctagtctttctaggtgtttaaaagtgtacaacggcctgtcgcagtggcgcatgcctgtaatcccagcactttgggaggccgaggcaggcggatcacgaggtcaagagatcaggaccatcttggccaacatggtgaaaccccatctttactaaaaatacaaaaattagctggtcgtggtggtgcccacctgtagccccagttactcgagaggctgaggcaggagaatcgcttgaacttgggaggcggaagttgcagtgagccaagatcgcaccactgcactccagcctggcgacagagcgaggctccgtttcaaaaaaaaaagtgcacaatgtaggttaacagtagagggcttaagtaacacccctctaagcatttgttttcagtacttcctaggagtggttgcatttgggaatggaattgttaaaacttgatgcttaggagcgaatgcagactattcattgggtgtttggggtgggggaagggggggtgggcagaggaggtatgcagggagaggggttctgtgctcctgagattagttcagatggtctaaccattgttctatatgtgcattttagttaatattgtgtattaaaggataagtcttaatgctcaaagtatgttaaaaatagatgtagtaaatcagtccctttgtgaatgtccttttgttagtttttaggaaggcctgtcctctgggagtgacctttattagtccaccccttggagctagacatcctgtacttagtcacggggatggtggaagagggagaagaggaagggtgaagggaagggctctttgctagtatctccatatctagacgatggttttagatgataaccacaggtctacaagagcgtttttagtaaagtgcctgtgttcattgtggacaaagttattattttgcaacatctaagctttacgaatggggtgacaacttatgataaaaactagagctagtgaattagcctatttgtaaatacctttgttataattgataggatacatcttggacatggaattgttaagccacctctgagcagtgtatgtcaggacttgttcattaggttggcagcagaggggcagaaggaattatacaggtagagatgtatgcagatgtgtccatatatgtccatatttacattttgatagccattgatgtatgcatctcttggctgtactataagaacacattaattcaatggaaatacactttgctaatattttaatggtatagatctgctaatgaattctcttaaaaacatactgtattctgttgctgtgtgtttcattttaaattgagcattaagggaatgcagcatttaaatcagaactctgccaatgcttttatctagaggcgtgttgccatttttgtcttatatgaaatttctgtcccaagaaaggcaggattacatctttttttttttttttagcagtttgagttggtgtagtgtattcttggttatcagaatactcatatagctttgggattttgaattggtaaatattcatgatgtgtgaaaaatcatgatacatactgtacagtctcagtcccataaaattggatgttgtgcctacacacaggatctagaagaatatgtcaaactataaactgcttgtgattgtgaatgactttgttctttgcttgtgtttttcaatttcctataatgcacatactaacttttaaaaaataaaggttattttaaaagcctgtattaa

SEQ ID NO: 312 - DNA, 1438 bp, Homo sapiens
cgggcacccccgcccgccaggcacggccgcggctccttcctcttcctgcccgcggtagtgggggtggggcaggcctcgggacacctgcctccgccgccggccgccggccgccgtcctcgcgcggcttcccgggcggctctgccccgaccgtagactcccggcccgctcgccgcggcaggagccgtggttccgcggacctgggcgcgctctctccctggccactgggagaccccccgcggcctcgcggggaaaacctcgggactgccccgcgcccccggccgtctctgcgtcgctccttctcgcccgcgaccgtggactcgtcctcgcgagcctgggttggcggaagctgcgggggccggggtcgcactacttggcgcggaagggccggcggtgggcggagggatccccgtccgcggggtgagccgctgggcggagccgggaggagccgcgaggatccgcagtggggagccgggaggaacctggcgccggcacccacccgccgcgcccacgcgtgccgcggtcgcttgtttcccgcgggagcccggccgcgctcggggggaggcgcgcgcgcagctggggctgcctgggtctaggagctccggagccaccgttttgtgcccgtggagccgcggggaaggcgcacgcgctcgggtcttcccggcgggtcgtcctgcactttctccctctccggtacggaccgcggcgttctgtttccaggcaaaggaaaataagtcaaagactcagaaggcagcctgaatccagggcctgggatgcagggtttgctggaacgccagccggtgcgatcgcgcccctgggattccgcttagcccgcgcgtccatttccctgcatggtggactcagtaaagccggatctgtccaacgcctgcagcgtggatgtggaggcggactaatcaactagtgctctgttattatttctacccatcccttttctccatgctaatttgcttagaactttaacattgaatggacagcaaatgtcatgttctgtttaattatcactccttgaccattatgttaatttctttccctaacaaggtgacgcattgttttaagtaacaatgaccaactcatctactcttcttccaaattgtgtaaattgaagggtaaaatgtgggaaaacgctaaatttgaatgctaaatttgaacatttcacacaacaataatttgaaatgcttctttgcaatattatggcgtttcggaacagataaaaatacttcattttcagacatttggtcaacaaatacttcttggacgtttatatgcaaagcaatgcatgtaacattttcattactttgcaagtgtgcttatcagtaaaagaattttgttttaaattctagccttcgtttaaatgtattttagttaccacattgggaagaaaataaaatattactatgtacggaaaaaaaaaaaaaaaaaa

SEQ ID NO: 313 - DNA, 30487 bp, Homo sapiens
gtagttgggcaagtttacagctctctgtaatctgacagtagagtccagactggtttgatgaaagagggtaaactgtgggtgggcgtggcctgaggccccactagaagcccagggagatctgaggaaagggagggcttttctgatctctcccaattagaggattaggcaattggcagcgcagggcggtaactctgggcggggctgggctccagggctggacagcacagtccctctgaactgcacagagacctcgcaggccccgagaactgtcgcccttccacgatgtggctccgtgcctttatcctggccactctctctgcttccgcggcttggggtgagtccttctgaaatcaaaatgcggggcactttttgaaatccttgttctgggccgaggtgggcgcagatgcgtagaaaggcaaagacacaacaggtccggctctgcggcggggcacgacttccatattaggacttggacttggagcagctgagcccggccagcctggcccgcgcggagacgcagggagggtgaacatcctgagatcgccctgtactgctcgcccaaatgcaggccgacagccggcccacctcaggccgcacacacgagaaatttaggcagctcagtttgctgtcccttaattagtccccttacggctggatcacggagagcggctcaacataatattaagagcatcgactctggagccagagtgcgtgggttcgagtccccgctgggcgcttcctcgctgtgtgtccttaggcaagggactgcgctattccgtgcttgggttaccccctctctgaaacagaggtggcagtgctgcctacctcactgggctttggtgaggaggaaatgggtggctgtttctaaagcactcttggcagcgcctggtatgtagaaagcacgaaaaagggatggataaataaaggcgctgtttaaaaacgtagtgtatgaatagaaaatttgagctgtggtcaggccactatatcaggacctcttgccattaaaaagacagtttcttactcatgttctcaacaggagggggacaccagtgcgcggggcacaaggggaagcagcagagcctggggaggggacagggcggatctgaggccaaggggcttttactgtggcttccaaggatagaagaggaaaggcagggcaggcaggctgaggactggcaagttgggatacttcaggggctctggggcacaggggctgttcctaattgttttgtacctagccctggcatgattagggcaggtgggtagtggccagggcatggcaacccgatcaaagaggcagttggggtgtgggctctggggtggctggaccctgggagggagtttctccaaggtcaacaaggcctcagatgccagagcatcagaatacagaaagcaaaacacatggtacatagaggggtgcagcgaggggcctcgaaatacccccatgccattttatagacagagaaactgagactcacacagggaaatgtacttgcccagggtcaacccgaaaatcacgcctaggtctgtctctgggtcctgaatcctgacagcccagccccgtctgcatcctgtcttccttctggcagcctgacactgcgagagctctggaactgtggggaagggcagagaagagaggaagcctatttggaactgaatgttcctttacctctggttactcctggcaatgccatccatttccttccttaggaagaccatacaggctgcctccacttcctcagtttcctcctctgtaaaatgggcatgttgatgcctacccagcaaggcttatttgaagattaatttaaaaaactggaatgcatgcctggcacatagtaggtgcccaccatgttcgtgcttcatataacatcagcagcaactggtcttgttctcacacttgtttctgcctccccccattcacccactttttcacccttggcaatctggctgccatccacctcatcctgttgaagggaatccctgagctgagcatgaccagcccagtggtttcttctctgacttgactctcctccacctccctgaagtcctcagcactcttagctggttcctcgccctcttgctccctgggcttcaaagacatgggaacgttctctctcccctattctgatggatctttggtcttggccgtagtggtccctgtgtttgacctttgtttttttttctcttccctctcacactggcatcttcaatgaagccatacacatccaccgtatgtaccctcacagtccaggagaagattctgccctgctccctcaccaggcttccttccagctttgaagtgcgctcatcctgtggcatcatcttgcctggatatcccactcacatctccaccgagcctgtgtaaacagggatccagcattacaagccagctctttggtcttctttcccttccatttcccccacctctggtcagggaccaagtcttttcttttcctttcttttctttccctccctccctcactcccacttgcctgcctgcctgcctgcctgcctgccttccttccttccttccttccttccttccttccttccttccttccttctttccttccttccttctttccttccttccttccatccttccatctttcctttccttctttccttcttctctctctctggaggagccaggattacaggcacatgctaccacacccagctaatttttctattttcagtagagagggggtttcaccatgttggccaggctggtcttgaactcctgacctcaaatgatctgcctgccttggcctcccaaagtgctgggattacaggtgatccactgtgcctggtctccaagtctttcaaaataccttttagacatcatcatatttctacatattttttctttttttatttaaaattttaaaataattaagatgggggggaggatttcaggtgaagaccggaaatcccatacagtgctgaaaaggtggaaatcaccaagaaaacaggccacatgtaatgccaccacccattgctatgtcgataaacatgcttccaaggaagttcatctcagtattatttgtaattagcaacaacaacaaaagaaaagaagctaaatattgacattgcagggttggctattaataagatgagacatggatgctgttgtgtaactgggctttccataatgggtttccattgtgattggatattcccctttaagaccaaatctgaattgttctgttctgctctagccccacactttgagggaggtgttgacgtcttgtctgtatccaaagcagagcagctgggaggacaagaggctggaaatcatttcctaggagggaagctcagagaaactgaggtgactggagccagataggacctgaggggtgggcagcaagatcaagtgtctgaaaggccacaggctgcagatcagatcaggccagtatagtcccatgacaggtagaaccagaactgatgcggaggctgtgggaaatgaatttcagctcagtgaggaaacattgtccgtgctgcaagaatggagcagacctgcccagggccaccagaagaatcttccttgacctgatcacatcctttatctggaacggttcctgctgcttatttgtccattaaagaaaactcaagcgcttagcctggcattctaagccctccctgacatgtgcggtctcattccaggaatattttccactccccccagactccacctggtgcatgtgggccatgcccccttccccaggcaggctctgcattctgctgctctgagcctcagcaaattcccttctctctgctgtgtaccactctctgcttctcatctcccctcattcagtcctcccctgccgcaagtcccagctcctccatgatgcccgcaatcagaaggccttgccccctcttctaattcctagactgccttatgggtacctctcccaggacatggccacttccttcccagctgtagccccaggtgtatatgtgacccttccctataatggtcagtgcttgtgagaatatgggacacccctttttcatcctctcatccagcatgcggctcagtgccaggattctaatggataaatgtttccagagacttctaagggggaagctaaatgtcttgttctttcctagtagctctccttcttgcatttatttttagctggatgtttttatgcctccaattctagtttgcccattaaaccagctcaatgggttagggaggacattgatcgtcatccctattgtacatcaagagaaactgaggcctagagggtttaggtgacttatttaaggtcactcacttagaaagcggcaaactccacctggaatctgggtccagccttttgcctctgatgcatcctgatttattctccatgtccagcagggcatccgtcctcgccacctgtggtggacaccgtgcatggcaaagtgctggggaagttcgtcagcttagaaggatttgcacagcctgtggccattttcctgggaatcccttttgccaagccgcctcttggacccctgaggtttactccaccgcagcctgcagaaccatggagctttgtgaagaatgccacctcgtaccctcctatgtaagctgcggcatgtgtccttggggatgtttacctcaaagtgatgcaggaaggagtcaaggcagtcccctgacgggctgatcctttgctctggactccttaagatctttgtagatccttaagaacattccagaactctcacagcattctggagtccattatttaacacatgtttattgagcacctgctgtgtgccaggcgtgttctgggttcttgggatccattagtgaaaaagcaaagatccctaggttcctggagcgtgcattctagcagggggagacagataagaacaatatgcaaattactccgtggattatgtgatatgatagaacaggaaaagtgccttggaaacaaagaagcagttaagcaggtgagggagatcagaaggaaggatcccatgaattctgctgtcttgaattttgacatagtcggggagaggagtgggccaggaggtgtgtgggtggcaagtgtactgaggtgtccactcggcaagtgctcaactctcaggtgtgcctattcctgaggagaacaatggaaggtgtgtccattcaccctggccaagctgggaagaaaagcccaaaggttctaattggcctcaccatcactccccagggtaggaaggaccctacagacatcagagcagaccctgctcatctcagcagccaggtgttcggaggctttccagcagcccaccagtggccgccttcttttcttcccttttttaaaaaataatgtttactgtttttattttctgagtgcaaatgtaatatatacttattacagaaaatttaggaaatacagagaaaggaaagtaagaaaattaagatcacatacaatattccaccacccagagagaacaactatcagtattttagatggtaaagtattatgatgtaatatattgtttgtattccagtttttttgcctgttgatatactttctttctttaaaagggaatgctatattgagataatttggatgcctgctttgctcatttataagtatatcatgagcataattccatgccattaaatagcacagcctggtattaaaagctgcattacattgggtattgaaccataattaatttccccaagcttttatttggggtcattaagttatatatgatgtttttaataatataacatcatgaatgtgaaacatttatgcacattcatgaatagtttaggataacttctcagaaatgacatttctgagtcaaagagtatatatttcttgtttgatttccctcccaaaatattccaactacactcctcccattgacgtatgaacatctccatttggcagactcttggcaatgcttgggattattaaaaatatttttggctattgtataggcaaaataataataacaataccagcaatattattttcctctttaatttgcatttatctgaagaccagtgagttcttttttcctttcttcacattggaatgtattattattattattattattattattattgttattcctcttgcacttggtgatcttaggaaaatttcccaggatggaatcaagaagtcatctttgctggctctgattctgtcacttgagagctgtgtcatcccagagtctgagtgcctcagtttcctcatgtacctagtgggggcggtgatgactgccttttggtacattgaggtctgggactgttgcttataatatacttgtgtataagcaccacatggcatggatctacctggctatgtaaccttggtcaggttctctaacctgcctaggcttcagttttctcatctgtaaaatggagataatagaacctacctaatgggactagtctgaggcttaaatgagttaatatacaaaaggtacttaaaacagtgcctggaacactgggagaactaaataactattaccagtgttcatctatgttgcatccttgagatctttcatcagggcaacacaacagcaactgcctgggagaggcaggtggtagaatcttggcatgtcagggctgcaagactcatgtagaaatcactccgctcacttagacctggcggattgggacgcagagtgtaaaaggaattcacccaaggtcaccccataaatgcatgggagagacaaaactagagcacaattctcctgatgttgtcccacaaagatatcacccctgagctattgtgagaaatgtcacctcccagggaggatcagtgtattagtggtctcccctccttgatgctgggagttccaaaggctctggaaagggaagaggtgtgaagcccttctcactctgcttggtcttaggagaccttagtgagtcccagcgcccccacctgaagcccctgatagcctcctacccactacaatgtcgtgagtctgtaactatcaagtccatttccaggcttaaacctcccagtccaaggcgctgccgtagaaaacacctcgcttagatctggctgaacttcaggggttcttctttccccctccccaggtgcacccaagatcccaaggcggggcagttactctcagagctatttacaaaccgaaaggagaacattcctctcaagctttctgaagactgtctttacctcaatatttacactcctgctgacttgaccaagaaaaacaggctgccggtaagttgtgggaccccctggtcaaggcgtgtcagtgccagtaccccgcatcttctggggcagaatggaagggagtgaaggcagcttggggagggagctgcacaggccaggattgtttcagagaccccagggcctccacaggaaacactggttttccacacatcagtttaccctcgtgacataggcactctgggggagtttgttttgcatctttaatgaacatcttaattgttccaagttccctcatgctaatagaaggatgagaatgattacttttagttactagattaaaaatctgataccaagattgggtaagacatgattttcaatgttagtggtggaaagaacttagagaaaagccaacaccccaactcttccttttcaaatagagaaactgaggcccagacagggaaggggaggtcacccagtagggtagttttggctcaagtcttctgatcttcacatcagtgcttttgacatggagtagggcattgagcttgtatgtggcctttctccagcacagcaacattcatctggggtaactttcactgtccaggtacggatgttgggggcggagcctggacaatcccagaagctcttccttttgcctttggccaaatagctgggatttctttttgtacctaatttccctccctaattgtcttggcaaaggctgatgacccagtgagtcagaatttcccaaataaatgaagggcaggacatggggcagcccgccagctgcaggttggagggtggggagggtctgctggcaaaggaggcacccagggtgaaaaaacaaggggtgttgtgtctagccagtctcccaggggcaccgtggcatggtgcctaggagtgggggagcaggtctgcgaacgtggaactagaagttggtcctacatgtgctttgtgagacacaggaagtgagagaaaggtttactcattcattcattcattcattcattcattcattcattcttctattgtgtactcagtgccccatatacacagttagacctggggcttcagggaaaggaggaacatgaatccactccacacagcccctgccttcaaggatcttgccttctgggctgtagagacatatcctcccttcagcactttattgcaggccagccctcaggctcagtcttcacacaaagatgaatgcacactcaatccctccccaggaggcaggcagggattagagttgtgggagaaacaagggctctgggaacctggagtcaggagaacctccaggaatggccacaggctctagaactacacggtctgggtttaaatcctggttctgcttttgactagctgagagacttgggagtttcttaacttctctaagcctctgtttcctcaaaatgggaatcatcacatatgatcagtcaagggtgaccactaagcgtgatctcagtccctggctaaaaaggcagaggcaggctcatacccctgccctaacagtggactcactgcactgtggccggcgcctgcagtgtgctgggcagctcaacatgtggactctggaggcagactgcctgggttaaagtcctgctgctaccacttttgagttgtaggaccttgggcaggttaagtgcctccattttcccacctggataatgggacattattagtacctacccaatgtatagtttattttactgtgcttagaacagcacttgggacatagtttatgttacgagttcttttatatttcatgaataatattattacaatatcattattttagccactctcacttcttccccactatgtggacttttaaaatgcaagaatcatgcatgaggaattgtatccactctcatcctccagtattagcagagtccctggcacatgctaagttctcgacagtgttagtccattgactgaaggcatcctgaagtgggtgggttttaggctgggttctgcagggtggataggatttggggatgcagaggcataaggaggcatttgaggaagagacaccatcacaggcacgtgtgcttctcgagacaatcattcatgcacagagaagtttacttcaccaagagatagttaactgagatgaagctgagatacaagggctgccccatgggtacgctgagtgcatgaatagtctaggcttgagggtgatgggagtgtcctcccgaagaggacatccttagcctttgctatgcccatgatgatgttctcagcatcaagagcctttcggggaggaggcactggaggctgggtagaaaggaagggacagccagggtatgtgcagtagggtggtggcttgggtcccagttgggagaattatgcaggagagagattgccttttgcaaagttgctgggagctggtgaactttggatagcatcctccttcagttgtaaccaacaggtaggtcaccaaacaagacatcttctgagtgctccctggctctgtgtcctgtaactggtatgttgcttcctctctgcccaggtgatggtgtggatccacggaggggggctgatggtgggtgcggcatcaacctatgatgggctggcccttgctgcccatgaaaacgtggtggtggtgaccattcaatatcgcctgggcatctggggattcttcaggtaagaaatcggactctcctcactgcactttggcccccagaacgaggatgctaggacccagctcttgtcatgccagccctcaggggagcttagctaggttccacagtaaggcatccaagccccttcgtaattggacactacctaccctctcactacccagccactcatccacttgcctctgagcttttgcatgtgctgttccctctgcctggaatgcttattctatccgaagaacacctcttcatcctgcaagacccagcccccagttacctccactgaaagactcatctcctcttcacctatgtttctccagcacattgcttttctctgtcatgacacttagcagtcagcccagcaggtgaaggttgacacatctgacttctcatggaaaggagggaaggggcagagtcacagagggagctcagggcatgttgtgggtgaaggaatgggggctgcagatggtggggtgtgggagcatctgaccccttcctgtgggagtgttgggacccactcagctcattttctgcttgaaatttggcaagtgtgggaagcaaggatggagtcttcccatcaggtctccatggggacaggagtcagatctccttcaaggcgcaactgctatgaaccttttctaaggttctcctccatccatgccagtcaggtttcttcctgaacacgccactcagttggtctcattgcggtcatcaatgacctccccctgctctccacccaacctctcaggacttcccagcagcagcagatggccactcagcctctgtgacatgcttccttcccagcccctttcctggtcctccctcctccctgtccacaggcctctcttgtctccctctccctccttactaattcccagtgatcccagggagcagccagagcccctgtttccagcccacctcacctttgaagcccacaggcatcactcactccctcctccccacccctggctgtctaaagggtgccccactcttcccagggacaagttgaatccttgactcccactgcccctccccaacagagacccccttctcctcccaccacgcctccactcagcttctgctgccacatcctcccttgggctcaggagaaggccttgtggacagcccggactgtctcttttctcacaaccctcttggctgcgccttcagaatccactcagagtcccctactttgcacctcttccctggctcctagcccagccaaagctctctgtctgtcaccttgattatgatctttaacactttcagatccctgccacttttatataaagctgagttgcacagtagccagagtgatcacttaacacatgcattgaatcatgcgatgcctctgcacaaaaccctgcaggggcttcccatgctccttaccatgacagccgaagttcttgccaggccccagggccctctctagctgcacctcctgactcacactttctttcactgggccccaggccctttgcacttgctttttcttctgcctggaattcctttctttggatatttacaaggttcatgtgctcattgtgcttgttttatgaaggtctttgcctccaaaacctcaaatgtcactgcctccaaaaagccttccctgattgggatctgaaatggcaccccctgtcccactcctgtttttttccttactccattgtatttacctcagtgcactttgactacctgacatcattatattctctctatgtatctgtttatctgcttgtgatctgtagtgggaattcagtgtcatcacaggttttgcctgttttgctctcagatgtgctctagctcataagacagcgtcaggcatacagtagatgctcagtaaatagttgccagttgtgtgaatgtagaaccatacatcaccacaatgctgtactaatgaaagcagggtctcagagatgctgaagcccagccttattcttaagggttcactgagaacccctagccccatctgtggtcctgaaggtcctgcatgacatctctgctccccaccctcaacctgttctcttcctcacagcacaggggatgaacacagccgggggaactggggtcacctggaccaggtggctgccctgcgctgggtccaggacaacattgccagctttggagggaacccaggctctgtgaccatctttggagagtcagcgggaggagaaagtgtctctgttcttgtgagttttcctgtcaccaggcccaaccccacgcttgatgtgatgctgatgagacctcttggacacctgtcaatccagctatggatacctctgattacaatacctgaattcaggactggccctactcacagcccagcatcagggggtagaaagctaaagaccagctctccttggcccccaggaagctcagagctcagcttagtgtcctggggccatatgaatctccagttgcagcctgcaatggtggcattctcctcttccagcttggttgagctctctctctctctctctctttctctctctccttcacactcattttaacataaggactcacatcccttctcttgggaagtaggaataggcataaattatgagtaagggcaggcagagagaagaggtggacagaggtcattgtttggctaaaccagacctacatgtggaggggacatggacactgagcaggctgggaattcctctggggtggtctgatggcttgtccatgcccaagaaggaggcgacagtctttgtgactgtggggtccagtgggctaggggaggcaggcagaggaaggagggatggagccgcggatagggagggatggggcaggggttgtgggtcatagacacaaccttgggtgtgaggggtcctgctgggattggggattgggttcaggagacactgggggatctgggatgaaaacccagatgagaggtgctgggagctgtaggaagacttccacctccttgaggtgggcagagggtcagcccactactggattcctcagtcccgtgttggttttatagtggagtagatctagcctggaatagcgagtgagtcactgaccccactcctgagcatgaactctcctcccctccactctgctgtcaggttttgtctccattggccaagaacctcttccaccgggccatttctgagagtggcgtggccctcacttctgttctggtgaagaaaggtgatgtcaagcccttggctgaggtaggtctccggctggtacgtctccggctggacacccccacctccttggctctatgctcctgaatcctcagggatctctcttgtggtcggttgtagctaatgttctcctagaatcactgaggcaccaatggctgagcaggaagggcgaggagacaccttgatcagcgtcccagtttcacagccaggcaaaccgacacagggcttggaagggatttgccaagggcagcaggtgatcagggcagagctgggactccagctcatggccctagcagccagtacagtgccctatctgtgaccacactcctcctatgtgccagggcctggtgccatgttgggcagtgatggtgtcttgtgtctctctgggtctgcctaatggctggtaagtggaacaaccaggatttgaaagcagacaaggaaattcaggattccatgctctctatcccagctccacctcacatttcttgacacattcaccttgagatgattatgtccatttcaatggagataaggtagcagagatgagagattacataattgacccatgttacaattgagattagtaacagaggcaacgctccgtgggacctggaacccacacccacgggtctacagtatcttctgctgctccctgccactagtacaagttgggcttgggatagaatgccactttcctctttgatggagggaagggatgtcgctcttgaactctgttgttgcctgtgatctttgcagcaaattgctatcactgctgggtgcaaaaccaccacctctgctgtcatggttcactgcctgcgacagaagacggaagaggagctcttggagacgacattgaaaatggtaggttgcctgttcccgtagcccaaaccctgtaaacttggtcccagacttcttcatttcagctgtcctcttgcccagggacagtttcctgggacaatttctcaactctcagtatctgaatggggaatctgatttgtccttttttattgtaaaatgccacaaatgtaaaaaaagaaagtcaaaaaataacatgataaaaaattgtgtaacaatccccagtcctgaccaaaatttaatattttgccattcttgttttcagatgtatttttaagaaattaaatgttacatattcccaggggacaccatcatcctgaatttgggggatggagatattaagctcaaagattttcagaaagatgtcacaatttatcttggttgacttagaaattgtctgtattagacctagtggtggtccagttttctagattttctgagactgactcagttgtcatcctaggatagtcatccatccacccattcgttaatccgtctatctatgattgtcttatccatctatctgttcactaattcatccaattcactcatatctttttatcaatctaatgtcaacctattcataactttgtatttatctattttcaatccattcaccattcatggatcatccagccaccttatatctcaactccatcacccattcctccaaaatcaacaatccaattatcgcctgtctgctagttttcacccatctattcatgtatccattcaattcaactgtactccatgtattgaccaactccatccatccctccattgatccatccatccatccatgctaaatatgtaggggtgggtgttagaggtagcaaaacagacatgaagtggacatagtccctgctctcaaggaactatccaaagagaaatacattcatatacttcgcaggttgagtatggtggcagcacagaggggaagcattcattgtagtaatcagggatgcttcacagagaaggcggaggagccagatttgagaccagacagtggaattcaggagttcatgcccttaatcctgactccaccttatctttcctgagaaattcagctttcagatcattgtgcccattttaacagaggtaacaaagacagataaattttgtaattgccccatgtcacagttcaaattagtcacagaggcaacactgtaggacccagaaccgacacctgcgggtctagagtatcttctgccttccctgctccctgccatcctcacatattaggacttggggacctttaggattgttggatggccatggcagtctctcatcacagggaagaccaggaggacaaacacccagatgacacagcacccagggccattgggaactattccctttgagggggaagagtgtgaattccaagctcaggagtagcctggactctctccttggacctgaggctactcctggatcccagggctggcctctatcactggactctgcttgtgtttccatgagttgagtccaatgtggtattggtgcttaggtcttggctcaggctctaagtgaccaaagtgttcaaggaatgaaaacacaactgttttctaacgcccggaaggaggcaaatattccagcaattctgcatgtggcatcagaggacccagcttaaaagggaagagttgagtctttgggaaaacccatccctaagatcctagaacattcttttgagtttttctgagatcttgtggaagcacctccatgattacgcgctgcctccagtacacacacatgcagacacacagacaaacacacacacacacagacacacacacagagaaacacatacagacacacacacacagagacacacacagacacccacacacaaagagccacacacagacacactcatacacacacacacacacactcctggctagtgggacttcaatccttaatggagggacctgcactggttacatcctgagcacaggtcagatctgggaactacagtgcaacactacagtcactgcaatcttggtgaacacacaccaaagagaagcatggggtaggatgagactcagtgagcttgcgtgagtcagggctttctaatgggagatgaggaaactctcccaagtaccttgaacagaaaaagaaatgtgttgcaatagcatcgtcgtgtaaactgaaaatctcaggagttgatggcttcaggcatggctgggtccagatgatcataggatattattgagaatctaccattctctgtccttcagctttgcacatctctgtgttggcttcactcttaggcagatatatctcctgggaaggttaaagacaacagcactctagacttatgtcctatctgcttaaaaaccctctttctaaacaattcctgcaaaagttttggggtaaactctattggattgacatgagtgtatgcccatccctgaactaatattcatgttcagggagatggagcaccgcaggtcacatatagatatacgaattcacggagtgatgcgggaagaacctgacacctctgttgccccactcacccagctcagtgttctcctggtaagcctctcacccacatcctctgcctttgtcttcacagaaattcttatctctggacttacagggagaccccagagaggtaaggaccttttgtttctggattacgggttttgagtcttagcacctttaagctccaattaactgtgagtgaaagaatcatctcttgggtaattatagtaactcctgcgtgtttgtttctgaggcccagagaggggtagtgactcacctgggtaacacagccaggaagactagtggctggcctggaacccattttcctgactcccagtccagtgctcccaggcatcacctctgtgtgccctgggctctgcccactccccttcttttttacattttctgctccccaaaatggcactgtaggaggaggctgaaacagaaccttccacaatcaggaggcagagataacagcgatgattagccaaggagaggggaagcctaaatctcagtccaaggacactcgtctcctcccagcacacaggaaactccaacagtattctcccaatctcctcatccccactcccacccccacctcccagtgggttgacagtttctggtgacatcacctctgacgaatcttacaatcctgtcctctctgctgcctccctggagatcacagcactctcctaaatggtcatgggcggagtacatgagattcattcagcaaagacttaataaacacttcctatgtgccaggacttgtttaggagctggggatataacagtgaaaaaagaaagactccctaccctcttgggaccttccattacagtgccaggacagtgcaataaaaaagcaaatcaagtatgtattccgtttgatggtgtgcagcattaggggatagagtttgtgggtggcttcaatttaagtagcaggatcagggaatggttcaatgagaaggtggcatttgagccaagctctggaggaggcaggaagccagctgtcaggaaacctggagaagcctattccaggcagagggaacagtcactgcaaagaccctgacagaaggggccagtctggctggagaggaccgagtgtggggacagactggcttgaggctaaagaggtaatgggcagtgggagagagatcaattaaagtacttggatttggattcagagcaagatgggaagcctttggaggttttgaacagaggagtcacatgatcttagatctcacaaaggtctctgtctctggtgttcaaatagactgtaggaaaggggcaaagtggatgcagttgaccagctgggcagccactgcattgccataatccaggcaagggctcctggctgcttagacagggctgtggcagtggggatgggaggagtagttggagtctggatatctttgaaggaatagctgacaggatttgctgatggacaggatgcaaggggtaagaaacggggaggagtggaggacgccctgagttttctgacacaacaaggttgtgcccacacagggcagccacttgcaaactctaagtggagaacaatcacttgtcattgttgctgatggcagtcttccagcatggctgtcacccaactgaggtgctcccgtctcttgcctcaacttttagcctcttctacttcaccttctctccccatttccatgtctcatggtgcagccagactggccttccttaacagaattagagcacgtcacccccacttcttaaaagcctgaccttccttatgagacaaatccccttccctccatggagttagtccttcaaaacacacctgcgtgcacactgtgtgccagactgtgcagaaggtaggctctgcacctgtccctccctctagaccctgccccacagcatttctccaagccaagaactcttggttgtttctggaatttaccctgcacagtgacacctatgtccttttgctcatgcggttcccactgtttagaaattctcactcctttcctcacctggcaataccattcactgcccagagcccaccgcaggcaggcggcgtctcttccacgtagtctgccctgcatcttccttccagaggggctgctcctcttgctggcctcccacagcagccctgcctgaactgcacagcctcttaaggaggctggacttgcaccccaatcctgttcttcattgtcagccatattggattaggatctgatcttgtccagctaggtctggtccacttttcagaacatctcccccaggcagtccgaactagctcgtcattcattggcttttgtagagcagaccaaaggtcccagaagccatagggtctcaaaggctaggaattgtccagttccatctgatatccagaagggaaatacagcccatggggcgtggaactgggaagattccacagaggactggtgtctatgagagggacccacagcaaccttgctaacaagtaatacctaacagttattcagcctttccagacaccaggtgctgtgctaagtattttacatgtgttcagccatttaatcctcacaataactcacctcttagatgagaaaactgaggcccaaacaggtgaaactcccagccagtaagtagcagagccaggcttcagatgcagttaatctggtttcaaagtccatgctctatcttagcaacatccacgctctatcgtagcaactacaccattgtgactaaatatgaaatataactgtacccagaaccagctgccctgatggcaacacatgagttgggctctctctaatctgtgaccatataaaaattattcatcaaaggtgaaacctaaaattaagacatggatcaatatactgtgagttaatcactgattcttttactcatgattttctctctagtagggaatcatgtcctagtctaggctccttgagtgaccagggttcggtacctcctcaaagccacccgtggatcaataacagctcttgtttaaatacagatagatagcataatctcttcctcattaatcatggattctgtgtttataaattcacctgcttgctaaaatgtccttataacccccaaatcaatactggtggcactttcatggtcacacacaggcaggtacagagcaggggaagctggatttgcatgatgggcatgttccatctgagatccggcgaggcaacctctctcttcttgtttcatctctgatgtttacaagtgtcctcttcgcggtctatttagtgccgtgtgttctgcatttttgtgctttttgtagtgatgtcactgtttagagcgaacccaagagtagcgctgctgtctggcgttcctgagctaaacaggctgtgctgtgccttacggggaaggtgcctgtgtgagacaagcttggatgaggcaggagctgcagtgctgctggccgtgcatttggtgttgaaaaatccacataatagcacattcagaaaaaggagaaggaaattggccgattcatacatgaggctgtgatagaaagggctaaagtaacacctattgtgtgggatggagccgtggaagtctctttcaacagaaacccacacataaaagaaggttgatgaaaatgttgtggccagaggtttgcaaaaacctaacccagtatttcccccttgagtgatgaccctgtattctctaattcagtactcacgggggctttatcagaagcaactgccaggactaccgaaaatcaattgtggacacacagaggaaaatgcatgcacttcaaattgaaatatatagacatgtaattttacatagataatacatgtatttcaatatgagtgaagatttcttcctctcctcatcacctgagcagtgtcagcctctgcctgaagttctgcccctgagtcatggagacctacccccctaagttaggatcctgagcatgtgcagccatggcgcatggccatgccggtctatggtactggtctcaccctcagacaggcagagttggggacatgggtgtgactagggagggaatcacaggtgctgcactgctctctccccagagtcaaccccttctgggcactgtgattgatgggatgctgctgctgaaaacacctgaagagcttcaagctgaaaggaatttccacactgtcccctacatggtcggaattaacaagcaggagtttggctggttgattccaatggtgagaaggcacatgtctgttggagggactcaaccacccccatcagccctcctgtctctggtcccaggaatgcttccctctccgagctgcactctgagtcctgggcagctgttcccttcagcaggagttaacatttccacggaaatcttctccaggagggcacagttttcaccggggtatcagggccctgggattccctctccccagactctcttattgtcttcctattgaagaatcctgaagtgtctgtgctgggagggccagtagagaaaataactctgcagatgggaaaacggagggggcctagaagggggaaggagtggaggagtccggagaagcagtcgggggcttcctggcttcccacctcgggctgggtgtgcgtaattcccctgaaaatcactcatgctcttcatcacctcattgaaaatatccaaagaaagtggcttcttcttgagttaccattgacttctagggaacagcagacatcagcgtctactaagagagtggatggtcagaggaagatgaggatggaaaagctacctaatcgggtgctatgctcaatacctggtaacaaaataatctatacagcaaactccagagacccaaattacccatgatcaaacctgcacagttacccccaaacctaaaataaaagttggaaacaaataaatggaaaaagtaattgagttctaaaagtaaagaagtgttctccttccagttgaagataaacaaaactgaccctggttaaagcagtaggacagatttattcagtaatatgattgcaataggggaaatagtccagcgtggagtggactcacatccctgaaacaaaagcctgatgacgtttcataggccaggtgtgccaagggaaacactgtggtctatggggagaggcttggttcatgtgactagaccacctggatgtcttcatcctggctcacctggggcagaaacaaactcctcttatctttaggacaggaagccatgcattagaccgcaggaagaacccactgaagtcaggctctactctttcgacagggactgggaagatcaggagtgagctccctgaatgtttgcattgcaaagagaaggctctcaggtcctcaaggaaatggggttgggtggtagattcacatcccaaagggcagagaaagtgtttatcattgcaggcttctaaagtaactgctctagttgggttcggggacctggctgcttgtctccaggttttggctggagcagagtaaattgtcctggcagggttgagccttcccaggcagttatgttaaggatactggggtcattctagggacacagccttaagctgctagaagcaatgctagagattggtcgagtccctgagtgcagaggtttgggaagagttgttatgtgcgtagagatgtgcagttcgcccctcagaaggatttcagaggttataccaaagaccaaagccacgaagacaggatttaaggatttcagtgtcatctgtgacaggtgggggtactagggaggtctacatcctcttccccagagccctctattccacactggcctggcagacaccttgcatctccatgtcactgaccactgtagggatcccagccacagacacacacacacacacgcgcgcacacacacacactgcaaaacactgccacagcttctctgaaattttgttttttgttttttttttttgtaaactttgcaatgcttgagtttctggatataagcccatttgattcattgatttcacccatttcagtaaagactcatgcccttaaaagcccccataattagaggactttcagactgcattggtttggttggttggtcagtttgtttcttatcattaattcccaatgattcataaatgctgaacttttttttttttttagcagttgatgagctatccactctccgaagggcaactggaccagaagacagccatgtcactcctgtggaagtcctatccccttgttgtaagagtctaggaatcatgggaattggctgagacccagagagggacaaggacttgcccaaatcatagagcaattaaatggcagaatgaagactggggcctcagggtttcccccatctttccacctttcccacttcattttccaccctagcggggagttgcacagggcttatggggttcaccattgaggcaggactttctggtgggctggagaagctgcatcgctcacccggggctggtggtcactttttgatctatttcagtgcattgctaaggaactgattccagaagccactgagaaatacttaggaggaacagacgacactgtcaaaaagaaagacctgttcctggacttgatagcagatgtgatgtttggtgtcccatctgtgattgtggcccggaaccacagaggtgagtcccagaggtcgaacgggagggacacaaaccccacgagcttctgtatctgacccacctacctcccagcatagacagacatggaaacagctgagggtcaggcctcaaaggctgattccatatggcatgggatgaggtgctgtcttattttggtttatgccagcagaagactgtgagaaaaaaaaatccagaggcaagtggtttttttaaggtgatgatcccagataacagcagtagggaggtggggaagtgagagaggaaagagatggaatccaatccaagatgcgttgtcaagggagtatccactgtggacaactggagcggggaaactcaaggaaacaccaagaatacagggctcaggggcatcccatctgagtggcaagggagccgggtatttattcaccagcttctacttgtcattggttgaaggctcttgcaaggaattgtttattccctgtgacttcgacctgctgcacacaagggcagagtagtctcttgtgaccagacaaaggcctcaggcctggagctgcagatgctggaggtggaagtcaggctggcatgcccaggaagaggggatataggtgagaccctggcagcatctgctgcaagggctccatgcctggagttattgtgggacatagggctgctgtaggacaaatattgaaagatgagtcgtggaagggttttaaggtctgagccagctgcaaacaagtttgttaagtattggagctggataaaaagtgggagccctgcatgggatccagaggattgtccaggaccaagaaggccagagagaggagccagggcgggtgtgggagaggtggtctgtagaatggcagtgtctgagggtggtttttatgcatctcagtgcgtgcagtagcatgcaagcacagggcaagggcagggtctatgcaggacctgctaccactgacccaaggctgtgtgggtggggcatgacgttagggatgtgtgtgctcacctagagaggagtgtctgttcctgcgtgccagctagaggagattcacaggattccttttcttccagctctcattcgcctagtctgcaagctaggaaatgtcctctctctaaccatgctggaagggtttttaaatttagaacttcataagcatgataaaaactagctaacgcttaactagcaggtgccctgacacacctttgcacaggaaggggcaggtgctcataaccctcatttcttcacagggtcctgataaaaacctttaaccaagaccactggagttgaatctgttctttcttaaacttgcccttgccctatgctctgcgtctgaactatatatagagttcccatctccattttctgatggtttgagcaatactgaacttatgtttttcatctggtttcccatgactttaagttcagggcttttttttttttttttttgccaggactacacagattttatctactttcacttattgttgtctcactctttttgataaaataacatttctgaatataaaattaatatgttaaattatagaaactttcaaaaatatggaaacacaaaaagaagaaactatgtatcactcatttccactacctggaggcaagtgctataaattttttgtgttttcgtctaaagattttccatgtcctatatactttaaaaatcaattttatattttacttttgttcatagaacactatgttgtgaggattttctcaatgttgatacaaactcatcaaagcattccttattccatgaaatggctgtgttaaatagactttaatattcatatcctattagatgtttagcctggctactcacattctgatgctacaataacattgagctcagcctaatgttcataagtctctaaacacatgtctaataattttcttaggattatttttagaagtaaataactaggttggacaatgcaaatgttttagaactttgggcaaatattgtaaaattgcattccactgcataagaatgtggatttcttaattctctttctcatttgggatgctaagattaaaaattagcataacacttccagtttcataagccttccccaccaacaagaagcacatcagcctgttttaatctgcatgtcctccatgactagccctctcattgtctctgcttctcttattatgtctaattgtcattacccaaatctgtgcgctactttcctctgaagacttgtgttgtgattgtaagaattgtataaatatcaatggctttagccaaagagttttacaaagtacgttttgggcagcatgctgcctataataagttctatcattcacaaaagctctttcttctatggttggctctgagtttctttggaaaatgttcgaggggcaaaggcaaggtcaaaccctccttttagcaagttttgtttgaccttgaagcagccatttaacaggtggattacagagccacagaaggatggcatcttcccaggtgcgcttcctgctgagccgagggtgcagtgcaggaggctgacaaagatgagtgaatagattattcttcattctcacattgaaatgacatgtgcgggtggggcatgaggttagggatgcgtgagctcccattgttaaatccttttgtgaacgaatttttaatgatgttaagaaatgatggctggaggcggtggctcttgccaacactctcagcattttgggaggctgaggtgggaggattatgagagcctaggatttcaagatcagcctgggcaacatagtgagaccctgtctctacaaaacaatttaaaagggaagtgattacagtgtactacaaaataccatatataatatcatccccagttaaatacataaaagagagatatgctaaaataaaaaagaagcattctctgagtggtagagttatgagtgatactttaaatttgattgttaaaattgatttttaaattatataggatatggaaaaattttagaaggaaatacaaaaaatgcatggcccttgcctcaggtagtggaattatgagtgatatctagttttgctttatgcgtttccatatttttgtttcttctaattattcctaattgtttttattttccaaatttcttactgtacccaaaggggaggacattgtaaattttctccaccagcctggcattgccctgactctttccgtcttagtgtcacttctcagtgggtatcatgaccagtgcaaagtgctgaggcacagggccaggcggcccacgaggtagccctgaaggggcagcgatctgtggctccaatgagccaatcattgggaaactggcatcttcctggggctgggacaggagagctttgttggtgggagaggagggcagagccgaaggagagagggcaggggagaggcaaggtcacccttgctcagcgccttcttttctctgccagggctttactgccttaacaccctaacactcccaggccaggcaggcagcaagacacatggggacagtgagctataaagcagtgagtgccgcaggttcctgagacacaagaggcagattgttccctctctgcatatgtttgtatttaaatagcctcatgttcagacaagcaacttggatttgcttcagtcttctcaggatgggtgagaaaaacactggaaatgctcaaaacgaggcagaacagaagacacctgtcatggtggagatggcatccaagtgaatgaacgcgagtctgttatcaatgaattatatccggtgtaaccagatgtagagagattgtcttgtgtgagaatgcaccagcaggcaaaggggtttacgaggcagagtcagggtccctgcaccggcagctgttttaaatgaattgacccagggtttccacattcattcattaaacatttgttcattgaacaaatatttggctctaattccgcttccacctcagacagctatgcagcccggagcgcatcactgagctttcctgagactctgtttctctactgtgctgacagccagaggtttgctgcagagctgaagaccttggtagcctccaggtgtgtgtctggcaacatgaactgtgcatgaatccttgtcttctcagatgctggagcacccacctacatgtatgagtttcagtaccgtccaagcttctcatcagacatgaaacccaagacggtgataggagaccacggggatgagctcttctccgtctttggggccccatttttaaaaggtaatgctccttcctgtctgtgagctaggagttagagacttgggttccagtcttggtgtggtggccttcagcaattttgtcctctcctggtcttagtttcctgattctgtataacagggttgaatgtcactgggttgtccgccggcttcctcccactctaacacatgtgaggagggatgtgtattcatgtgccctctgcacagacgctcagaatcctgctgtgtgacatcaagacaggtggtggtgggggtctcctgcaggattcactatgacagggttgaatgtcactgggttgttccccggcttcctcccgctctaacacacctgagggaggatgtgtatcatgtaccctctgccacagacactcagaatcctgggctgtgtcatcaacaagataggcggtgggacacatgcggggccctgctctaggttgagaagccaccaatcaatttccctctcccaggagcgctgagacagtgagtgagggtgagattagaattggtgttaaccctaagtcaggtctaatgtgtgcctgtttgtctttctgtctgtctctaacaaaaactcataaacctttacatttagtacatttaataattgttgatttagaattcacaggatgtatgaatttggaacaggagaagagaatattttttatatggtttatagtcagcaaggtggccatcccacaggctgggaaggtgcctctggccaagcccagaaacgggctcattggaggaggggttgggtaggagctttatgtgaacggattggctaaacatacatgttcaacaggttacagggggagcaatggatattcatgaagacagtcctgacacatgtgtattaaacaaacacgtatgtaacatggcccatgttcacctggtggtggagacctaatatttaaatgtattacaattagggcctgtaagtccaaaggtcttctcaggacacgaagctcagcaagtgaggagcttctgtacaccggccaggtccagtccatggctggtgatgttcttatctggagaaagttactgaaatcagtctcttatgcaatcaaagcagtagttaagtctggcaagtcagggttctgtttgtctgcgtatcccagctgcagccgttgttattgttttccttttgcttagctccaggccagtgctggtttagctgctagagaaagagaagcacctcgtggcagtgagaacaaagtggattcttttttttttttattattatactttaagttttagggtacatgtgcacattgtgcaggttagttacatatgtatacatgtgccgtgctggtgcgctgcacccactaactcgtcatctagcattaggtatatctcccagtgctatccctcccccctccccccaccccaccacagtccccagagtgtgatattccccttcctgtgtccatgtgatctcattgttcaattcccacctatgagtgagaatatgcggtgtttggttttttgttcttgcgatagtttactgagaatgatggtttccaatttcatccatgtccctacaaaggacatgaactcatcattttttatggctgcatagtattccacggtgtatatgtgccacattttcttaatccagtctatcattgttggacatttgggttggttccaagtctttgctattgtgaataatgccgcaataaacatacgtgtgcatgtgtctttatagcagcatgatttatagtcatttgggtatatacccagtaatgggatggctgggtcaaatggtatttctagttctagatccctgaggaatcgccacactgacttccacaatggttgaactagtttacagtcccaccaacagtgtaaaagtgttcctatttctccacatcctctccagcacctgttgtttcctgactttttagagatgcaggcctgaacccttgcccgacgtggccttaggtctcgtttttaatttggtgtcttattgccacaaagagtgtgttctgtcagaatgatgaccttcattttattgctgatgctggtccggtggtgtctaaatcacaaaagggagggagtattatgaggcgtgtctgacctcctgtccgttcccaggcaggaacagagttgaaggtttttcgaggctccccttagcccagagagggtctgttcagtcagttgggggtgtcaggattttatttttagtttacattatacaatagtttaaaaaatcctttcacggtgtcttctaagtcttaactctcagcagttacagatcagatgggactcaccccatggctgctcagaacgcaccagcgcctctgggcatctcactgtgcatgcttaggcgccttgcggctctgttgtttttcagaatgtgaattgtgggtgtgtgctggggagggagaaaagacccaagagagagcaaccctggaaagtggggttgctgtagaggaaaccctggggtggggcatttcctgtgaccctgagcggggaggaggcaggcgagggtcacaggagacaaaggcagccagccaatggaatgacgcatgcccattgctgagccctaggtcagatatgctgaaaggtaaagtacacacaaatccaccacgatcttctaaaagtgcagacctcagctcagtgggtgtggggcatgtgccaagactatgtttccagcagactcgcatgtgatgttgacgctgcagtccacggaccacactttgagtaacaaaggctttttttcttcttccccacagagggtgcctcagaagaggagatcagacttagcaagatggtgatgaaattctgggccaactttgctcgcaatgggtgaggctggtggcaaagacagagcacggctggtgagggtggggggcggggcatgcctattgggaaggggcagcttctaaggttctagtgatcaaacttctgaccctgtgaccatagcactctgataatgagagctctctgcaaacggagaggccgcccctggagatagtgagctctccatctctggaggtatacaagcctcttgacagagataacttgggcatcctcacacatctctgaagattgttgggaacacacagcagctttggggcaattctaattgattctgtttccagaaaccccaatggggaagggctgccccactggccagagtacaaccagaaggaagggtatctgcagattggtgccaacacccaggcggcccagaagctgaaggacaaagaagtagctttctggaccaacctctttgccaagaaggcagtggagaagccaccccagacagaacacatagagctgtgaatgaagatccagccggccttgggagcctggaggagcaaagactggggtcttttgcgaaagggattgcaggttcagaaggcatcttaccatggctggggaattgtctggtggtggggggcaggggacagaggccatgaaggagcaagttttgtatttgtgacctcagctttgggaataaaggatcttttgaaggccaaa

SEQ ID NO: 314 - DNA, 74078 bp, Homo sapiens
cggccgcggggggcggggagagggtggctaggctcgcgggagctcgccgggcagggcgcctcccaggaaggcggggaggggagcgcctgtttacccaggagggctgtgctgatagcacgttcctcgagtttactttgctttccttgagtttattgtaaaggggtaaagttttcggatccgtcacgtgaccctgacaggtcctgcctatggcgcggcagaccacccacgccgagggccatggaactgcttaatagaaacaggcttgtaattgtgagtccgcgctgcactccgccgaaagcctccggcggcccagcgcgccggggtttttacactttccgttccttttgtaaagacggaggaggaggagaagaagaagaagaaaacggaggagaagaaaaagacgacaggggagacaaagagacccgcagcgacaaggcaagggggagacgagggaagactgggagaagacggaggagcggaggacgaggaaaggggggccagggaaaaaaaaggaattgatgtgaaatccaagcccagcgtccgcgccatcggcacccgcgctccgagcaggggttgacggccggctatggtgagtgcagccagcgcggcggccgccgacgccacctcgcctcgcgcgccgtgctcctcgggcggcgcggggacacggggacgcgggacgccccgcgcggcggacggaggagcgagccccgagcgccgggcaggaggggcgggccgcgcgccggggccgtggagccgggtgggctgcgccgcctgggcgcgggagcgcgggtcccgcgcctccacgctcgctcgcacgcccgggcccccgcccccgaggccagccccgcgtggcggggagggggctggccgcggcgggccccggctgaggaacggctccggggggaattctcacggagggggtcgccggagctcccattttcacgcctgaaagggtcgccaccttggcttccgctcatcagcctggtggtggctactgactcgccagcggaggcagagctggtgatggaagggctggtgcggagagtgacagcgccgaggggagggggctcagagcgcgcgcgcggaagccgctgccgccagctcgcgggagcagccgcagccgcagggaagggcacgctcgcgccccgcagacccgctctcgagcccgcacgcacgcctaggggtgcgggacacccgggctagaagagacgcaccttacccacctcccctcccatgctgcgggaaaagggccagagaggcttttggagttctggaaggggcggtgggtaagagaggtggtgtgtgtgactcttatgcccaccgattcaggcgcttgggtggctgccacccttacagagatgggcgaccagcccagtgcttagagtgcagagtgcggcctcaggggagcccgggggcgggccggaccgattctcactttacaggcccgggcccagcgctgaaccccaagacccccagaaactgtgcctctgggtgacatgcgctgtgtctccacgtatttagtacgttcatgtttaaaatgatgctagcgtgtggatgagcacactctcagggaaactgatctgtttccatcacctaagaagaaccatatgggtgggcggctgtggaagacacccacagacctgttttcctgcacctgggagagaagaccgtcttcctccctttttatcctttcttcctccctggggaggagaaatacaaaagaactagacataaataataaagagccacaatgggtggctctaaatatttgataattggatcactgaggtcttgaactaccacaatagtcctttttcagcattctgtgtgtgtgcatttcttttaggtttttatttatttctgtgtttattggcgacagtagttcagcatgcaattaatcgcctccacaaagaaagacaatgctttatggtgtcatcctttgttattgcaacttaaaatttctgggtggtactccggataaattgttgcctcaggtgcatggagtgcccaagttgtaaaacaaggggctttcgattgtgagtttatgtgtgttccagttgtcacccagcttccttccacaaggctataaaatgcctttgagtccatgatctgtttcaattaaaatgttgaatcaaggtagacatcaataggccccgccattctcaatttggggtattagcttcatttcaaactcactgtgagtggtgtatctaatttctggttataaagtagtcataatctttgaagctatttgaacaaaacttagaaccatttggaattattttctgaaaagaaaaaggctgttttacaaaattatcttcaactttctacagatagataaactgatgaggttaatcaatgtggattaaaatatgtctcccgtttttatcctcattcctctctctctctcacacacacacacacacacacacacaccttttattttctccagcctctgccacagtgtataatgccctattgagacgtgtaggcgtgatgtgtaaaccggattagcagtatgaaagaaagacacacaataagctggaattgttttacttccctttcatttctcatgcctatatttctgataaatttgttgctccagcagtgggtcaaagggatcatgttgctcagcttctttttcatgcaggacccaatagcagagatcactgaaatgaatggtgtgcctcctagcaaacgcaaagcttgatagagatatattagacagggagaggcgaggagagggaaggatgcaaaacatgttcaaagtctgggtgttgtaggaatacatctctatccatgagaggaaagcaatgtgggtaagaatatatttggagagagagggatcaatgcaggggtcaatgctctgttttctttcaagttcatagtaggctctgaacattcagcagttggtgacatgcttagcaagagaataccaatagcttttggcaatacataaagtctaattcccctttcaagctagtatttagacctggagtaatcaatgtggagatttctgggaccttctcaggacactcccctctgccgctttccccacccccagctcactgtaagctcaaaaaatgccagtgctcccgggtttgtgctgtagacccctcatttactcctttgtggagttaggagcagcttcccattaaaggagatcaggggtaattagcagcattattttgacaagttggctagagctgttccctttcctccagcctggggagggggtaaataaggggaggaaacagaaggtggaagggagtaggggaggggagtcaagcccagtagttttaaattttgtagctgctgaatctccccccaccccgtccccgacttccctgaaaccttttagactcattttctaccatcaccttttaagaatatacaaaagctgccaatgagaaaatagtaaggcattcttagggagccaagaaaatgtggtggatggtggcacattggcttgagttgagtcgactcaactcatattcaaggtacctgcttggaactgctgaagccctgccttgaccatcactcacatcctgtatcctgggctccccatgcagtaaaagaatattgcatcaaatccccaattcctctctccatccgaccctctcaacaaaaatactgtaggacttaaaatcatgtttgcaattccttgtatttctggaagagtattaaactcagtagacaaaattataaatggccccagggtcaaattactggaatacattaacccctttattcatttatactctgcaaaacttgccaaattacattggattttaaagactcatttggtttgatctgagaaaccagtgaaaagttaaatctcactgtggtttttcataactccaccaagtctggcttccacaattgcttaccattggaacatcccaacacaaagggcagatgttttatttcattgtcatcatttggataatctgatgtcatttttgaaatgtgtgtggtgtggccatggatatttgtagtattggaacagagaagggaggagatgtgagggaatccggagagcttaaggcatctgctttgaaaactacacactccaatgagaagtcttggatcatgactgggagaccaaaatgacaatttatgcattgagatgaactttacttggaaaggggaaatggaacactcagctgttgcttcataaaggctggcaactcctgctggctgataaggccccaagttctcacttatttttatttggtaactgtcacaaggggtgccagaggcagaagggccatttaaagggactgtcttcccggaggacaccttagcaggtctggctgccccagtctgcatctcagatctgtggaatccttgtggttagttgaagttaacaaacccggtgtggcacagcagtcccctgcacagggcatgcatattaaagccgacaatgcttacaaatgtaaataagggcagattgattaggaacaacattatcgctgggaatgtcgcactcgcatgcatcagcaatgaggcaaattgggggcagcctcagccctgaccacccaagtcgagcaggcttttacactggctcctcttccctttcttaaaacgttacagaaacaaggccaattagatcctcaaagtaattcatctctaagtatgaaaaaagcagaccacaggggaagcggcgggtggggggtggggagattaagatagcgctcgttagagccgaggctccggagtgcgtcctggaacccacgggtagaatttacaggccgggaccattgtctgagatgctgaaaagttaacccatcaaacagcgggcgagggggctcagggcactgaaagctccggggatcaatgttcaaaacgtttaggaattaagtcaaactaagggatatgggcctgagtggaagaggctttgccactgaaatgacgtgcatgtggcagccgccggaaccagaggacatgcagccgcgtgcggagagtgaggcggatccattacgggcacacagcttaccatttccttccagaattccttcttccaaacaagctatactgaaatccctctagtaaaagattgagacgaaacactaatagttttgggccaaaacgtggtggagaagtttgaaaagacaaacatagcaacgtgtctttggctatatggttccttgccctccagcaagcttgaaatataaaaaggctaacatgcaaaactaggggtactacccccctcccccagtttttaaaaagcaatttccagaagcaaacacacaatggttcgacttgaagtgtcggcataaccattcagtaagaaaagctagaatagtaaacctcttttcctgttttgtgctatttatcaaacctaataaacatcaggatcgtactcaaagatgaaactggcaatgtgtggagccgtctgagctctttatcaactcagtgtcattttcctcgcatgctgcccgcctgctttccgagtttccgcagcccttccctgaggcactcacaaaatcacgtgctccttaagcggtctgagttttgaatttccgcgctggcccggtgctcaggtccccctccggatcccgcgaacgcccccaaacacctccaccccgtctccctctcttcctcgggacatcccgccctgaccccggcaccgcatacggtttgcgggttagggggtcgggggaagggcctccccctgaagccggggaggaggagaggctggagggaaggtggccaggctggtgggggaggggagattgagggagggagcggggcgagggaggaaggagaaggcgcaggccgaaggaaggaagcggggaggggaaaccgccggggaggaaggaagggggcggggagagccggcggacgggccccctgcgggagccgcgtggaccgccccggtggccggcgcgccccgccgcagcccccagcgcgcccgggcagccagcgcggggccgctgaatgggcagggactcgtgagcgcgaccattggccggtcgcggggaggcggcgcgggcattgggcagcgtaagggggccggtccgccttcaggaatgtactacggcgcgtccggcacgtccgtccgcgccggctgggcgcgcgcctcgcctgggctctcgggagaccgcgctggaggcccggagccggcccggcgcatccgcctccctacctactctgccccggccgcgcgggcgcggggagtccgggagccgggcgcgcgcgcgcaccgggcctcctggcgcggggtcacgtggccaccggagctccgccttctccctgctcctccccctttccctccatctgggtttctttctttcctttcctttctttcttctttttttttcaatgaacatacaccgtgcgcatcttaaagccacaccgccccatttcacgacttcactagacttctcgctactgccagtccctctgcagttcaaccccgtttaaaaaaaaaaataaagtgaagcaaatcaagggtttgcgggtcgggttcctaccgcagggaggaacgtaataacttggaaacgtaagaaaaacacattccactttccgaaaacaaaaatttttttaaataaaaagcctagttgtgtagacgtgtctggctccagaatccacctcaaagggtcgcgtgttttccccctccgcgggaagcgaatccccgggatgccttggtgacactggacgcggtgtcgggacgaatcctcgcgatccgcgcacagtttgttttcaatgaatccagcatcggggcatttataatctcctacgtcatactattattaaatataacatgcataccgagttttgtaaaaaaaaatactgactatataaacatctggttaataaaaaggggtgtacaaatgaacccaaaataatcaggaaaactttactctctcaaggaaacaattccgtttctctaagttgtaaaaaaagattctgttgtttctcttttacttatgtcacattcgagattcaaataaaaacgcctctgcctctacaagactgcttcggtgtctggattccacgtttatagaacactgactccttcaaaccaagactgtgttttttttttttttaagttggggggagaaagcggctggggggcagacggattttaagaaagatggcttttcccaacgtccttgctttcctctttaactttccattctgtttatcttaatgcgaggcgttgttccctgcaagagcctaagtcttccctttagttataaaagaaaagagaagaggaaaaaaaaatctggcacacactggcgcactatccagcacgctgtcattattggtgcaggcctgggaatgcgagccggacctcccagtatttgctgcagcttgaggccaaggtgcctctgaaaggcttttctttgaggaatttcagaaattgtttaagcgcttaaaaaaatattacatttccccccgtgtctaccgcgaggcaaatgttcgtgtgtgtgcgtgcgcgcgcgtgtgtgcgcgcaaaggcatcccacaaaaagaagacactgttgaaaagaaaaggaataagagagaaaggagggggagcattccttaatggaagtattgcatgcgagaaggttggcgctctcagaggctgccccgaagccgaggatgcacacactgggttgcctacctgggtggtctctctactttggtgagctgttgctaagcagctaataatagtcatgtttgctgagtaatttctgccctccgcgagccaatcgcgtcgcagaaacccaagccatctgacagccccgggggcgggagctccagcctttttctctttcgctcgctctctccccctccaccccctcccctcccctcctcctcttctttctccaaatggagagagttcttttttttcttcttccatctcatctattgaatcaaggagctgctgcggccgctgcccgctgcacacacacagagcggagtccccaggtcccgggagcgagagaggcgcgctgcacggggacagaatggtccagcgggttgccgaggagcacaagaaagcagagtccgggaccgagcagccaccgcgaacccagcagccagagcccgagcagcccgagcagcagctcctggagccgccaccgccagcagcagccaccgcgggagcagcggcagctgcggctgcccgggcccggcagcgctgagacccgccgggcaccctcggaccccgcggcggcggcggctctgcgcttgccctccgcggccgctcgggcgacccgggaggcgccgagagagccagcgcggccggcgggagcagcggggattcgctggctctttctgcagtgaaggggtcgcggcgcggggcggggggcgggtagggggagttggggaccgcaaggagtgccgcggaagcgcccgaaggacaggctcgctcggcgcgccggctctcgctcttccgcgaactggatgtgggcagcggcggccgcagagacctcgggacccccgcgcaatgtggcaatggaaggcgcagggtctgactccccggcagcggccgcggccgcagcggcagcagcgcccgccgtgtgagcagcagcagcggctggtctgtcaaccggagcccgagcccgagcagcctgcggccagcagcgtcctcgcaagccgagcgcccaggcgcgccaggagcccgcagcagcggcagcagcgcgccgggccgcccgggaagcctccgtccccgcggcggcggcggcggcggcggcaacatggcctcggctggtaacgccgccgagccccaggaccgcggcggcggcggcagcggctgtatcggtgccccgggacggccggctggaggcgggaggcgcagacggacgggggggctgcgccgtgctgccgcgccggaccgggactatctgcaccggcccagctactgcgacgccgccttcgctctggagcagatttccaaggtgcatttcagactctctcctcccactttctcttccctcctctaactctttgggatcgcccccgccacacacaaacacacacactctcttcctctctctctcacacacacacacacactcactcacacctctccaggaaaagcagcagacaaatggggattgaaaaattcaaaccctccctctggtcctgggaggaaagggctgtctgaggtccgcagggggtggaggtgtgtgtgtgtgcgtgtgtgtgtgtgtatacacacgccctccctggtgtgccttttccggagcactggaaagccgtccacggcggaccacctcaagggcggccgcggcactgtcctgccccgtgccccctgccctgaacttcttcctcctgcgcccctgcccctatttgcagcctaaactcctgtacggctgccacatttcttaacatcttggagggggaggcggagtggagagaggcggagagaggaaggggggagggagccgaaataaaggtggtttccttttttggcagccagttttggttttgttgagcatgaaatctctgctcccttaaaaaattattctcggaaaaagatatcccccccgttttccaggttttgagccgcctctccttagggcctggtcgggggaggaaaagttgtaaacaaattgccaccttaaattcgcggtgcgagtctgcggagctgccgggttcattgtgtttacgaggctcgctgaaatgtgtggaatccagggaaggcgagcacccagacgggggcccgccggggccgcggccagcgccggggaaatgccgcgccggggagcagcctgcgccggcctgagcccttccctttgcactcggctgttttttacgtttaaccagaaaggaagggagaggagggaaagatccatgtggctgccctcttccgatcacaaatattgtcgtaagttgcagctggctgccccacttcctaattcagctcacacagcctctccccacgctatggaaatgcgtcgggagtgaactccggcggccgcgctcaccacgtggatccccacttactaccattctcggcgggggtccagttgggggaacccgcaatatgttgttccaaagagcgctcgcccctagcgcccgtccccgagggtgatggacagagcaggactggtttgctggctcctgaaccttgggctccatcgctgggattacgcagcccctcccttctcagctctggggtgaatattgtctgtgtcgagtggtttctctcctctctacctcggcttcctcttctgtattgcagccccagtgccccaagtcgctcagggatcccgcgggtgggggcgccctgatgtccccgaggtgcagctcccacgctgcggcccggctttatgaccgagccccccatgacgctcagatccgccggggctgcagtctcgagggcgagtccgtgtgccgcggccacccgcgcccccacggctgttgggggctcaccgggcgggtgcgcgcaagcgggcgtgggcgcgcgggccgcgactccccggcgctcactcctcccttctgcttcgtccccaggggaaggctactggccggaaagcgccgctgtggctgagagcgaagtttcagagactcttatttaaactgggttgttacattcaaaaaaactgcggcaagttcttggttgtgggcctcctcatatttggggccttcgcggtgggattaaaagcagcgaacctcgagaccaacgtggaggagctgtgggtggaaggtaagagcgcccgccgcggcgcccgcgcccccggcccggtccctcctcgcggttgatagagatattcgccagcgcacacctagagcctggctgcggccggcgaaaccccctgcccgcacccgggggattgtttattgtttgggcgcctggccgggagccaggcccgcccgacaaaggccgcgctgtaatctactcggggcgctgcgccggccgaggtgtggtgggagagagcggcgggggcgggacgggggcgcggggcccctccgggacggaccactctgcgcgccgggggccccgggcccgccgccgctgccgctgtccgcctgggccgcgccccgagaggcgccccggggctggcctctcccggccccgctccgcggcccggctttcttctctcccccacccccacccaccgcgtccaaagaaaaaggagtcggggagagccagaggccacccctccggctggctggagtgtgcgcgcccccggcggccgcggccgccgcgctggggagggccgggggcgggcgcagcgcggggctgcggaggcggcggcgtgtgtggtcctgtttttggacagctttcaactctgagggaaaaaaacatttgtctcaaggtacaaaaaacgcggggtgggggtggaaggagtggaaaaaaaaatagtaaggcacagactggaacgcatgtttgcaaagtagattaatgtttcctcgcgggtgggggctttttacatggaattattctgggggaaggctgcattttgcaggcaaagaaaagaaatgttttaagaacgcggggttgaagggacctctcagaggggttctgccagtcttttatccacgttcctcagttttggggttcttgagaccttagcaaagcagttgcagatttaaaatagatatatattttttcgaagacaaacatttttacattattttggtgacaaaggtttcaatttttttcccccgctggtttcttatttatctttttggcaagttccaaatcctgctatttggaaacactttaaccctaaacaccactttgggcatcccttaccttacaagagggtagtaggggagggtagaggtgactaggtagataattcaaaccaaaatacctggagcattcctccggacagcatgtggaagctgaagagttatgcgcataatcgcttcagtgatccctttcaggatgctgttggagaccttgaagaatatttccttaatctctccttgtttgtgaagattcagcttgcagagttttgcaagcctggggtggagttggagtatttagttgagaagtgacaattaaaataatagtctacataattaagacaaaacattcctgccttaagtagtttggtaattaatacaaaagcgttctttggattgaatccatggagtaatttacctcagttcagcgattcagtatcactggtagataaaagaagggttttatcgagcagctattatgctcctagcaacaagtttcttgagcacctatgatgtccctagcactgtgttaagcaccataagagactcaagtgtgtgcgacactgcacaatttaaaactattagaattcgatgcatttggactacatttgggttcacagctgaaatgggctgtgaaagttacaagagggtggtagggggtggggggagagaactggagacggtaggggaaggagggcattttaggcatgggcgggacaccagcaggggccccagctgaggagtttggaagtgatgtgattggctagactgtaggggcgctgccgtagattctaggacagaatagggcatgaggacagggagggccgctgccgtagattcttggacagaatagggcatgagcacagggagggccggctcatccaccacttgatccaacctgtatttgttgccatcggatgaggatgacaaaacgtgattttgtggtgttcttagcaagagttttcagtggacctttgacatgttgaaggagatagaatgtgatttattttcttaacattgcatatttctggaaataacttgctttctgcataacacgacccatttcaagtcctggaaggagatgcagtgtgcttcctagcagttttatgggagctgccagttgtgtagtgagagggagtaaagtttttctttttcaatggactggatgaggacacttctgaggggcacactcactttgcttacttttggcagtttcagcatgactcactggtcttgggccaaatgttatttactcagtactaatactgtcacttgttgagcaactgccatgtaccaggcatttgttatatattatcgcatgccttacgattcaataaaatagctattattatcttttttttttttttttttttttttttttttttttttttttttgagacggagtctcgctctgtcgcccaggccagactgcggactgcagtggcgcaatctcggctcactgcaagctccacttcctgggttcacgccattctcctgcctcagcctcccgagtagctgggactacaggcgcccgccaccgcgcccggctaattttttgtatttttagtagagacggggtttcaccttgttagccaggatggtctcgatctcctgacctcatgatccacccgcctcggcctcccaaagtgctgggattacaggcgtgagccaccgcgcccggccctattttgtttttataacatgatagtggatgtaatgtctttatgatgaggattgtcccattttacagatgggaaactatgggttgtctgtttgtctccaggtctactttgcctactaatgacataagtcacttgttctgttgccctgtccttgatctctcattcattcattcattcattcattctgtgctagattctccccctagagaagaagcgacagtttcataaatgcagatagacccaactagagaggtgactatacaacagtagccatatagatttaatttcattttcaaagcagaagtgattgtgtagagatcttgtttgtgacagagtgagctgagtgttcacgtcagcagtaagtagtgtgagcatttgcattcaggagtaagatttccctgctgtcctatacctcagtggacgtccgtgaattgaagtgagtaatagctccacatttaagttcattttgtgcatcagtctcatagataaattcctcatcactatcagcaaagaaatctgttagatgctgctttcttggtaggttgttcttaaggttctagacatgaatttttatatgaactgggcatcaacagagtgcttgctacacaaacgaaatggatagaggtagcatattgccctagttagaaaacaacagaagagaggaaagtatgagattttaaggggagagggatgctgagggatagtttggaagaagctccttctcctgcggtttaaaatcacaggagcgtgtgtgtgtatgcacattgtcttattctgcatatcctcctatctgccaaaggcatgttaatgttatctttttaatacagccagcaaattaaagggatccactcgaaaggctgtgtcttcaaattgactttcatgctttgtttaacatgctggggaaatgtggctttataaagagttggctttataaagagggcagaatacatcagccacaatgtgcagactaatatatgctagatgagaaagagtccgtgtgtgtgcatgcgcgtgtgtgtgcgtgtgtaggaattggtgataagaattattgtattctgttgttaaaatgtccatataatgattgccttttaataaactgtcaattatatgttaagataccagcttgagttttagggttatagtgtttgctaatcaaaattgtcaaatcagtttcacatatgtgcggagtaatgaggtttgatagagaatatgttgactgatgtagtggacatctgctgttgcagaaacacatgaccatggcagcaaggtgggggagaaactaattgtcattgtataaaaatagaagcgttcattctgcacatgttctcagtacctactctgcaccaccattgcagaaagctctccagagagatgttggtgaaaagccacagtctctgccctcaggggaactccatccaaacattcagcaggtacacggactggtgtgtgggtagttaacatgaaggacagcagtgccaagatggcaggaaaatcggggacatcttccaggatggcctcaagggtggaggcctgagctaggcacaggggctggaggggagagggtagggggcattcagggcagaaggaacagcataggcaaaggctcagagaacaggaatgtggcctcctggagggcagcctccctttgtgggtcgttgaggttgggtgggagcctggaagctgggctcgtccctcagggccatttcacagaagtctccctgcttggctgggggctgtcagctcttcctactagccatccctgtctcacgagtgtgctcacgtgttggcctctagtgttttccctggagccacgaatgcttcacctggatctcacctttctgggcacagactggtgttatttttaatcttgcctgtttctttgttggtatttcctttttgttaagcagttttaacccatctccctcagtatctatttcttttcatatcagccccctcactgcagccctccctcagaacaagtttcttgtcaagcttctccagcgatagaacattcatttatttctttgagctttttgttttttctaaaagcttgcccagctcctggcctccttttctgcagagggcagcagccttgtaatgaatccatattgctttggtgtttggatgttaacattgctgcaggccagcgtcaaggaagaaggaggcaagttgtgactttgacttttttttttttttaagaaaaatagaagaaattgttttttaaaatacatgcttggtatgtgtaagtgctttcaagtttgtaccttgctagtgttaatgctttcagtgttcttgaactcaggcaatcagttgtaggagataactgagtttcaccactccttcaatttggagcaaggtccctcaacctcaggactattgacattggggctggatcatcctctgttgttgggggctgttctgtgcactataagatgtttagcagcatcctggtttctacctactagatgccagtagcaccctcccagttgtgacaaccagaatgtttccagtcattgccagatgtcactgggggagagggtgtcccaaatcatcacgattgagacccactggtttagatgataaaaagattttgattggaagactcatgctgtgcagatggaagacgtttattatgatggagttgtggctacaatgcattgcagagatgcaagagtattaatcttctttaagataactcccccatcccattcctgtatttatagacccagataactatttttcttagaatgacattaaatgtcaaagaaaaacaccgtgatgggtcgaaagaggaaagaggccatggaagaaagaaataatttatatttgggtaccttttggtggggggtatctaaatttgcagaaagactggttgcacctcaaccccagtagcctgaaggtttttagcatggttgactttctgaaaagctttaatagaagacaccactgcctttgtgcatattgaaataacagctccttcagaagcccggctagtgtgtgaactccttggtggtctcattctcctccagatgtttctgtcacaaaccactcccccttgtccccccaggagcccttgtggagcagaaccaagggacagcaagggaccagtcccagccagaagggcagaatggattctgctgtcactgcccttccacagtgagcacctggtttcttttctctggggttgccattgtgggggcatttcacaagggacaggaagaaaaatgcagctcctttctgctccctggacccccatacatggtttagaagggagaatatgtttataggtatttattagtttctactactgggtatgcacatttaggtggaagcagttgtgatatttctttcatatttggagaaaaacgattggaaatgagaagccaccaatgattgtttaaaaaagaacaaatagccctcaggtgtcttctacacagggcagttgaccctgcgaatcctccctatctctttgctgtctgccattcttgacccttcaccaagttgagaggacaggttgggtaatggggtgtttcagatacataggatgccgctcagaggttccagaagatgacagcttccagatgtatgaacagcctgatccgtgtgtttagattatgcaccacagctgatgccgagattaatgctggctggacaagccatgggagatttgtctggtttccacaatgccatgtttatgtttcatttgagtttctccttcaaagctgacctgcctgtgaccctgggctctgtccactcgggcaagctgaaactcgggcaagctgaaactcgtctgccctgttctcctgcttgtattggggtaggggagagtcacaattgggcggagaaaggggcgctttggtggccgccttctgcctcaccatgccagctatctgcccagatttagcccctgatgagtgttcagttctcctcggggatgtgtttcactgtaaaaggttttttggcttttaaaacaaatatggaaatattataaaataactgtaaaggggaccagatttaatagaagccactttgcataaatgtagtattttaacttctggcactcttttgacactatttagggggagaaaaagttgagggaatttcagctatgtcagacacccccacataataaccatggctgtgtcatcctattataatactattaatgtttcctgtgcccctcgctggctcccagaacctctgctgcctcctccctctctcccctgcccccttccctcctgccccttctcccgcccacccactctaacctgcccacgtcatttccttccaagtggatctctgcagttactagtgtgaactctgaaatggtagtaagtctggctaatcacaacctaagaggagggaatgagaacatttattatttcaagccagctgtgggagatactagatacagagctgccatttgcatccttggcattcttattttggttagggttggttccaagaccacactctttgatgggctcttggcagaagatgtgattcccctgttgaagaatcatgactttttttaatggactgctgaggcaactttaaaatccattgacaagtttcttcaacccataccacaccgccagagagagtgggaaataagtcttggtcccctgtgcttaccgtggcgcatggacagtggaagaactgggttccctagcatttctgagacagtgagtggagcacaaaccatggctttccctcccaggtgccccacttcaggtcttccttgcttagaactcccaccaaagccagtgggcacatggagcttggctagattgaagacgatggaattccttatccagattttggccgactctgaagctttatgtgttccatcctcacgagaggtcttggttgacatccagagaccagagggccttgctggtgagggcacttctgcctgcaggaggaggaagctctgcgggattctctcagtgggaacattccttgaatacacagatataatcagggtcatcaaaatataaacacttctgttactttctcttctaatctttgaatttgggtgcttatgataatactcactggattttttttttctctttaaattggatttagggcactttttttcctttacactgcaatgtctaatgccttccgtacagcagaatactgccattgagaaactgctgggctgtggtggaggattttaggagcctggtgtacaggaagatgcgccccatccttagtccctccaggagggaatatgactgttccatttggggtttagagcatggctggaaaaacagctgtcatgtgttagggaaactgtattgttggtgggcagtcagatacctgctaatgaatggcaagtttgttgttggagagatttataatgtgggggcaggaccttatttctaatccagaaacccaggtgtgagttggcccaaatagtccactctgcatgtgggtcccataatgccactgctatgaaagcaaggctagtgagaagcaagtccccataccacagcgcaagctttatttattattgttcggataaatgaaaagaagcagtagacttacccaatttagcaaccaagatagttttcagttattaatgagacatgtataaaagtaagcaaaaggaactggaaatgggctttgttaagtcaatgtgcatgattttttttcccccttaaatcattgcttaagggcttctggcccctagctcaggaatcctgcccaaaaatgccagatgtattacacagtcaagtattgcaatgtaaacaccactccgtgccacgaggcagggtggtccatctcctatttaagaagagtgcgagattgagaggatggggggtgggggggtaaaccctctgctctgtagtgagcccagtggtggttgtgtcatttgtgtttttggctgcacagtcaagatttgaaactacaaaacccagataaacacattggaatggcaaagaatagcaacttgaattgggatgccaaacaaatcaagatgtggcttggatagtgttgcttcattgggtcagataagtttataaaatgtgggacagaatggagggtggggagagacaggaagagcgctcttgtcacagcagcatctttaagttgcatgagcatcctgttattcatttgctggtggttaaatggaaaggtgagtggaagcgaggcggagagagcccgagcctccaagatgacctcctccgtgagaggaagccctcccgggtgggtgcaccttccaagcctggaaaagctgatgggttgcaaagccagtctggtgttctgtggcactgagggatgtagcccacgatatgttctgaagtaaatggctttccagttttctcctgctttctgcatttctgaagtaagaagtctgctaatgatgattgttcggagctgagaaagtcactggcactttgggccaccctccggtataacgtgtcgtacgatgctgccagcaatgacaggaaattggagtacccaaatattacctatccttccagatagcctaacatgaagcagccctgagagtgactacactcagggtttttaaaaattaatacgaacatgttttgtgagttaggaagaaataggatttcagtttgaatttgcggaattgttgaaatacctgcgccaatattctcctgattaagaaatttattctacagagtgatctgagaaaacggctttaagaaatagtgatgataaaaacaggaattttgagatgaaggaaaatgtaggcttcttgactccctctttctcctcccaccgctgttttttttccttttgtgaattcttccacattcccacccccactccctgatttcctctgctcctttactgggaaaccagcaaccttcacaaaatagactcaaacatcacacagcctctttttaaatagaggctttctaagagaaaataacaaaagaatttttcctagctgcctaagaaattctttcttcttactttattttcctcatgagatttacacattgttgtaataagtaaaaaatgataaatatgataccatcattttggtctacacatgatccagaaaaaaaaattgcacatgtttaataccttgcttaattgcaaacaaagcttgcaatttgagagaattgggattagggctaaatatctattaactgctctttctagagatttggggactaggatgacccttttttttttcttttttttttttaataggctacagtttcacatggctcccaaaagaaatctctctccctttttgtttcccacaccaattgatttatcattttgcttgcaagcagatccagaatgttagggcaagaacacactcacttttttctcgtaacttttttgttgcggaccgaaaccagttgacttgaataaatttttctgaggcctgaatgtagccagcaacgtggaaaaatcttgccattcagggccgtctgaatgtacatttcagccacacagtaagctgcattgggaggcgctggactgctaaatgcaaccatttttcgcagcagcgagttagacaggtgattagcataattagcaccgagcagctatacatatggtaatgctgagtgtgtaaatgccagctgcggtgtaaaatttatgtcaggggtcggcagggctgtgcgaaagtattgtgttccagctgcaggtcagggccgccaaagcttacctccttttctcttgttggtgaatacgccaaacagaagagaaagacagaaatataacagatacggctttgatgggacagcccagttctgtgcaagagggactgctctataaaacacacacactcacacacacttgcagaaatcccattactttctgtagaaatcgtgtgtgtacttcatgcagggtccagatgagtggggccgggatggaggtaggtaaatgattccctgggaggaaaaaattcagtcattgaagttttaaaaggagttaaaagttctgttttgtttttcttcccacccatccttttaccccccacaccattccctccaccactctcctgcccacattgtcttatttcacattagatggggggatatccttgctggatgggatagcattggtcctttagaagaggaggaactaaccgttctggaggtgttagccttgaacaaaatataaggtttcagcagtgcaactcttcccaaactgcttgactagctttagaaaggggctaaaaaaagcttttgtgggctttttgttcttcctctgggtagctatacttactcgcctacctatacttactccccctacctccactgtcagacccaccaaattctttatagatttaaaaaaaaaaaaagaatcacatgggtttcttgtttgaaaggatagtcttgaatggctcacatactttgaaatgcatgatgcgggaatttattgctatgatgagtttatacattttgcacttgaggtattttctctgccacgcccccacctccacccttccgttttttggttggtggctataagaagtggtggtgttgacagaatatagttcacaccatgctgacccggtgatgaaacttcctcacggcaccagggggtccttatgtactggcccctaatccagctaatcctgatggcaacaaaatcatgaaagtggcccccagtgacgtgagtctccctgcacagatgcagagggaaggaacagtgcaggagataaatgaggccagcgtggtattcaccggaggccagggagcctgcgtgcgaaggtggagactcgcattgtcttctcccccatgtcggctcaagtgggaggccaatgaagagaggcccaggctggataatggcaagaagactgttcagagctgagaggtgatgtcagccccacagaagctgagagaaggaaactggggttaatgttatgcaatgccttgagtgctgtgatggagagcctgccgtggaagcacttgggttttgttgttgttgttgggtttctttctgtttctatttttttaatgaagacttcaggaggtttcaactaagcttgatgaaaacacgctgtgttggttcctgggttctgctgcctgctgctgctggagtgtggcctctgagccagcgcgcgctcgtcatcacacctctgggcccgcccacttcctgcagagcgacgggacctgggtgtgcatctgcctgcctgttgcgcttgagcggcctggttgcacctgaggttgtggtagaacctgggacagttcccagcttggaaagtacgctgttccggatggaagacatttccgcctgtgctctgcaggaagtcagcaacgttcttgggcctgtctcaggtggcgcggtgcacagccctcatttgccagtgtggcaagtaaccaatgaagaaggggcctcctggcagatgcagcgtcgtctcgggaactcgtggctccttgggagctggtgggagctgcgacaggcagcaggtccagcgtgggcagagtgccgggctgacctgattgcatctgacagggcgagcaggtctgcgtcagggaaagccattcagagggagcagcctgggcaaggctgataacagatggcactgccagcagctggtgggggcggggaagcttgcttccggcgcatgcgcgttgcagaaccccgcgcgagcgcctgcgcactacctgcgcccagcctgccacatgccccgtgcggtcccgtgcggttccgtgggcaggtgggggtgtccttttctcgttatgctttggtggttgacctctcactgggctcacttcatgaaggcacattctctttgggctgattgtagcgtttttcccatggcaacacgcaggggcacaatctcataaggaaaaaaacggcccagaaacttggacagcggttggctcctcctgaataaaagagatgggtgggagaggactaaaattcacagcccgtgaattttcagccaattgctcacattactgaattttcttttttttttgtttttcgattataaaaaagaggcagtgctaataattttgcagttacacccgcttagagatttgtactttttcggcctcacagtaagtaaatgcaacattgaaaggaggacctgagcaactaaaagaaaaagaaaatctctctagaggctgttagataattcatgggattaatcaaatgcaaatgcaacgcttgcatatacacagaccctattttcctaattggactctgagtgggtacttttcaggctgaaagggtcatttgttttgactgattgactttttgaggctttggggggaattaataacttatacagatgactgcctgttcccaaggctctgtattgagactgcgcattcatttattcattcagcacacttggtgtgccatgcccctggtgcccctctgcgtccctcacatacggaggtgcatgggcaggacttgaattttgtggaaaataacttcggttggtccctcagatcatctttatgtggatcacaataagcttttgctaaaaggtttttgtgtgaatgacacagaagtttcttaagctctgtgcagaaggctgtgctgaggaggggcacagcagggaagcgtgatgagggaaacatctcttgtctacagtggattggaatcatattggcctagaagtatgggcctctgggtcagctggcatcccacctgagctagctagcctttcttcactttggaaagttaagcctggcttgatttggggatgagaggatcagcagagcttgatcaaaaacttatttgcagaagtgatgcttcttttgcctttcaaagaattggcttaagccttggatttctggagaataagatggcagaatttgcaggtaaagaggcttagggctgcatgttctctgtgtgccttcatctgccccctctaagacaggactctctggggaccagaaggaaaatgaggcctgtccactgtgacccagggagccctactgaaaaaaatgcatctcctcactggctgagaaaagtctttgatgcaacatggttgtactttaaataaaaatacggattattgtcatatttcacgcattctaaaattctagctgtgagcgtaatacaggttgagtatcccttatacaaaatgtttgggaccagaagtgtatgggattttggatttttttaagggggggtgatattcacacataagcatgatgagaaagcttgaggatgggacccaactctaaacatgaaatttgtttatgtttcaactactttatgcatctagcctgaagggaattttatacgatattttaagataattgtgtgcctgaaacaatgttggtgtatattgaactgtctgaaagcaaagatgtcactatctcagccacccatgtggacaatctggttgtgtggcattcccatccttcctgacttaaaatttatatgctgccgataagcaatcattttcttaaactaattcacacctacgtacttaccagtaaaaaaaccacgacattccattaatgcagtgaaaaaaataatgtgttcagggtacccaagcagcacaatagcatcaccagatacctgcatcagtggctaaacaacagcagcttccggtctccacctgcaatgctgtgttttcactgagaggttactgtacaccatgttttatttttttaggtgagaagaaacatcagaagcagttgaaggatcagggagtgggttgtgtaggggcgaggagacatctgctggatggcttttcagaatgtttcctccagcatcaccggcctcattaacaatagtttctgtcttaagacgtctctctttgattttatgaattgacatgatttcctgtttggttgtgaatgcacgatgcgttagttttcaataagcccatcacacatttttaccaggtctgctatagttaactttttgtgcagttgtaacatgtcatcttcatggttgtgagcctgttttgactgtgactgattacatgaggtcagatgtggaattttccacttggagcatcatattggcactcaggaaggttttggagcatttgagaccttcagattagggatgctcaacctgtctagtgtgctctgtggaatttggcactcctaggctacctcctgctgtactcatgttctcagctggtgctcagaaaccatgaggctcgcagggtagttggactctgggttaaagggtcagttctgcctcttactaataaggtgggcaaccttgggcaagccacccaaactctgcagctatgccccctcccctgtaacatcaggacagtgaaacaatgctctgtgacaaaggcatgggtgaactgacacttgctccgctcttgggtaagggtctgggaaatttcacacacattgtcagctaaggctctcacagtcctgtgaggttcatcacagcatttgttatccctgttatcctcagcaaccaggaaaggtggctgaggctcagctgtgtcagggacttgtcctagatctctctgccactagtggcaatgctggggtcttccggtttccattctcactgcctgtctggtacagctggccccagcttgatggaggagcagcaatgatcaaaatatttccaaagacgtaaagaatatggtctcaaagggctttgcaaatggaaagcaccacccaagtataaaacgttattttgtgtctcaggatcctgagataatgatttttcttgagtcttgttcagaggggttgttattttattgttaatataaaaggacttcagaatatgatgaagatgcatatgattatttttatagtttattagtattattgatacataatactgtatatatttgtggtgtacatgtgatgttttgatataagcatatgatgtgtaatgatcagatgagggtaattggaatgtccatcacctcaaacacattcatcatttttttgtgttgagaacattctaaatcttctcttctagctattttgaaatatacagtgtattgttgttaactgtagtctccctactatgctatggaacactagaatgtattctttctacttaactgtatgttggtactcattaacccacctctcttcatttcccctctcattcttcccagcctctgataaccctcattctactctctaagtccatcagattaatcttttttacctctcatatatgagtgagtacagagatgcctatttttttttgcattgagtttgtttttaattcatatctctaccaagtagctctcatatctatctttcttttgtgtgtgtgtgtgtgtgtgtgtgtgtgtgtgtgtgtcacatagaaggttttgtttttctgggttttgttttgttttgaagtggggtctcattctattgcccaggctggagtgcagtgacacagtcacagtgcactgcaccccccaactcctgggctcaagcgatcctcacacttcagcctctgaagtagctagaactaaaggcagcctccactactccacagctatttctttaactttttatttgtagagataaatacgtttatctgtgttgcccaggctggtctcgactcctggccttaagtgatccttccaccttggcctcccaaagtgctgggattacaggcatgagccaccatgtccaaccatagaagcttttaattatactctttcattgtagaaaaattgatagaaataaactcaaaaaagcaaagcgggtaaatattatccatagtccggccaggtgcagtggctcacgcctgtaatcccagcactttgggaggccgaggtgggcggatcacaaggtcaggagatcgagaccatcctggctaacacagtgaaaccccatctctactaaaaatacaaaaaaaattagccaggcctggtggcgggcgcctgtagtcccagctacttgggaggcttaggcaggagaatggcgtgaaccctggaggcagagcttgcagtgagctgagatggggccactgcactccagcctgggcgacagagcaagactccgtcacaaaaaaaaaaaaaaaattatccatagcctaccacacagcaaaaatggctattaacttggttccctatgcctacatctacataacagatactagatttaatagttattttcttctgcactatttcacgaacattagattattttaaaaatatgttaggactttgatcctgacagtggaaaaaagtcatgcctgaaatcccagcactttgggaggccaaggcaggaggattacttaagctgaggagtttgagaccagcttgggcaacatagtgaggcccccgtatctacccaaaaaaatgaaaagttagctgggcatggtggtgtgtgcctgtagttggagttatctggggtattaggggaggaggatcgcttaagcccaggaggttgaggctgcggtgagcagtgattgtgccactgcactccagcctgggcaacagagcaagaccttgtctttaaataaaagaaaaagaagggggaaacctatttctccaagaccatgaccttcatctcagtcatctaaaatgggttctgtgggacttcctgagctcaaagcttcacacttagggatgataaggaagacagcaagataatgaacagctttcagctgtcattcagcagtgatttaggataggcgtttgctagggtagcaaatgtcagacgagtcagtaaaattgctctatcctgaagggtttctgtttctggcagcttgctccagagtgccttgggtcaatactgatgtcagaatatatgagtgtcgtgcactttatgacacagttatacccgagagggagctgattctaccagttcacatggtgaatgacacaagacttaattatggtctcaccaagctccgccacacttgcctcccttctctccctgcaacaagccaaacctgagggctttgcagttgctggttcttctacccagaacgctgtttctccagctcttcaaagtcacctaaatgttgtttccctttaggtcttccctgctatcccatttgaaatatcttttccccttccccactacccaacatggcatcaccatcttcgttttctgcatcacacttgtgctatgaaggtatcttattgttttgcttggctgttgcctgttcccttcactgaccagcatgcctcttggagagagactacgctgactggtttcgtccaccacatccccactgcctggtcaaagtacccacccacccacccacaaatgcttgctggatgaatgaatcatgttacagctattggtcagataaaatgggtggcaactaaacttcattaacgtttttgaatcattttgcaaaacattcatatttggttaaatataagatgaaatattagataaaatataaccatataatatgtaaaagtgaattgcatttaatagtatatatggcataggtggttgagaaaaccgtagacttcagagtctcaactctagttgcttggccaccctatcatgatagtcttagttgaaacatcacattggcaaaatatttgtgttcatcattagagcaaagagatgggggagcgacaggttttccaattccagagaaaggacaaatctatacctttattaaaatgtttatgtaaatatacatcttaaaacatctaaaaaggggacatgatggagaccctgaggtacattttatatcttgtagaaaataaatgccatttctgaaacaccctgtgataaaataactgctccattatgaggttggtctggaagagtctggtaaaaatttcttagcagcacaaactttgtgtttggttttgccatttttgtgcacactgcactctcaggtcacttcgaggattatatagttaacaggcggctgctctgccaaggctcgaggggcagaatcttgctgaagccaggctgtctgtcatggactgctcctcactataacggcacctaggtcaccataataagggtggggggtgtgctttgttgctgctgttttttaatttcatgggtttaagtcacctgatatgttaagcttcagtaaaggtgcaggaggtgcaactttgtaatcagaatgaaaaaccacgtgcatgctgatgttcgaggaggcagtaacaatgggaatgatttctgggtttgtggcattagatgtgataacacaaagaaagggtgagcaaaagctgcattgagctccttggtgggcagctctgcagctgtgacctctggactcataactggctttttagcctcatacagcttctgcacttctaggggatgtgggctggctcaaattcagttaattggttggaagtctgcgtggtgttaagtactgtgctttctgctagagtgagcaagcccctgccttcaggcagctttcccagggcttgcagaaaaggccagccgagtaggtagatgcttctctgtgcaagttgtttcccagtgttttcctgtgatttttccttaacttcacattgatggcaaggccctcggcaatgccccctggcatttttcaaagttttctgcacacagaagtcttattcctttttattaaccaactgatatattcctccctccttcccgaccccacacgcagtatgttaaacctcacctcacggagctcctggccttggcatccgcgtggacctgcacagagggtcctgccaggcggtgaatttgtactggttttcctaatgagggcattatttgctttttagcctgcccccttgtttataaaatatgccaagagaactaaacaacccgctgttcccagtccttatttacttgtccaaaccaaatgtttatgtccttgaatactaaacttgaagaaaaaggattcctcctcgtgggaaagctatgatcactgagtttttttctaaactgtcgctgcaggcctgcttttcagtcaacatgcaacttatcaatgactttaggaacaattcagacccgcttcctttgccctagactgtggagtgggggagctctaggttcctgggtctgtaactattagtatctccctgagacacctcccagcccaggtgcagcattcggagcttggcttggcccagaaccgttcattgaacataaccttgggcctaaggatgtaaaaaggagaggaagagaaaaggcatttggcagtcacagtgttgatggttttctttggtcacctgctcctgcgctggctttgggcataccccgtgctggccagcttgctggaaagctgggttggtgtgaggcaggacttctcggcctgggcagcaggttcagggtcacctggggtgcttccggaaaacaggctgctcacccccagctgactgagaacctggcacctgtgttttctggatgctgaccaggtgcgtctgatggaaccaggttccagggactgcccatgatggctgtggctgatacagtttgttcctctcaattgggatttccccatgggcatctgacttgaatcactttatttatcttctcctggcaagttttgtgctgaacacacactggccacctttccttgtttctttttccacagaggagaaacatttccttgttacctttgccagtttacttaggagaagagtgtaaattgaagccatttatcttgaaatctgctgcaggggcgcattgtttatacaagtgaaagaaattgtaacagggttatttggtctggtctgcaaggaaaaggtgtctcaagttttcctttctgccccccactttcgtcacacagtgtattagttagaattaggtttgtgtctgtgacaggcgggacagccattaatgggcttagtgagtattttttatgtttactattggtgaagttaacattgccattaataaagtgaatgttactgctcacacatcagccagtctcatgactagagttcatctattgtgtatcctatggcaggtagtcagataacagataaaacatgagtttgcagtgattttgctattctaattaaacctgtacatatttgtcagttggaggacgagtaagtcgtgaattaaattatactcgccagaagattggagaagaggctatgtttaatcctcaactcatgatacagacccctaaagaagaaggtgctaatgtcctgaccacagaagcgctcctacaacacctggactcggcactccaggccagccgtgtccatgtatacatgtacaacaggtaaggcccgccgcgtccacctactaatgagcagcaggtaaggcggtgggagaaggctgctggtttaggccccgttattttagtaaatgaagttgccctggaaatgcacctggagtattagttcaaatagctttgcaatgaaaggatttttttcatcttgatttatcgtttctcgagtttggtaacaaagcaagtgcattacttgataatgtattgccagtaagtatcttggcactgtccccaaaagaggatgacgctgagccacttggggactatacacccaggctgtaagatgtttcattgcttaagagatttttggagagtgatattttgaattgcccttgctgaacttaaaaacaatgcgaaaaagaagagctgcttcttgtgactttgtactcttagttgttttgtgtcacacagcacgttgggggctgagccaccatgggaattgttgctgacacctttttatttatttttttgagacagagcctcactctgttgcccaggctggagtgcagtgatgtaatctcggctcactgcaacctctgcctcccgggtttaagcgattctcatgcctcagcttcccaaggagctggggctagaggcgcccaccaccacacctggctaatttttgtattttcagtagagatggggtttcaccattttggccaggctagtctcgaactcctgacctcaagtgatccgcctgcctcagcctcccaaagtgctggggttacaagcgtgagccaccatgcctggcccgctgacacctttttaaaaagtcatgttttagcatcgtattgctaatttcacaatgctgtgagtagagtaaagcattaggaagagttcaaaactcggtcctttttcttatgtatctagactgttggttactacagggcaggggccacctcttgtctgttttcaccccagcattgagaacagagtgggcattcagtttgttgattgcttttgaggttggcatcactaaaccccatttccaggggacctctgagttgatgtcacccaaccccatcacctcccctaggctttcagcacctcttcactgaggcctttgttagtactgtttatttttcctggaagaggtgaggaagtagcagtataggcatattcagcagccagggagaaccaaagaagagaataaaattaagatttttcttgtcccttctctaacctctgcttacattccagctcgacaggatcctagggacaagcacagccagggtcgagtcacatgtctttggcacattcttgtttgtttatctgtaacctgggcttatggtcatgtgtgctcgtatccttcatggttcccagaacaagaccagatacatgaatgcaagggccttagaaaatgtaaaatcatgtttctgccaggcaaacttgccctgttggtctgtaacaagtattgtagggaagcaactacctggtacagttttgcagaatgtgaagtggcatccctgtggggagccaggttgtcctggggccactgcaagcatggccaatgcattcttagtgtttgtcacctacatgcttcaggagaagatgtgagggtctgtgccattaaattacactcttaagctgagatgggtccagagtaattttatgcattggaatgaactttaagaacatgtagttcaacccatcccatgttttaggtgagaaaactgggaattagactaattagagcatttgtccaagttcatgcagttatgaaatgagagagccaggtttcaaagcctttttctggcttcaagcccattcatttttctaatgcacaatgatgtccttctcaagtgtaaatgagagttgatcaagtaatataaagtgagaacctactcatgccggatagtctatgttgatgctgtatagaattaaaatataaatatgtccatggatgtgtggctaggtggaggatggcggagatatgggtaagttaggcacagctctcaaagagaggaaagacatcagtatagatagacatggacaaaggaaacgtgggcggtccccatgacagctgcgccaggtttcagcaggagatctgcccagccagggctctagagttcaggagaagggggtcattttcaacaagcttaacatgggggtgacatttcaacagggcgctgagagacaggaaggcacagggaagaggacacagtaagctccttgggtgaagacaggcctcccttaggaggccaagaatagagcagttgggagggaagtttttactgtgtttctttcttttttttttttttttttccttcccttggacttttccatccccactcttccagattttcttttttttttcgttagactgatctccctaacacacctggaaagatatgggcttatataacacttttctagagacaataaaactcccgattaattcttttttttttgagagatagggtcttgcttatctaggctggagtgcagtggagcaatcacagcttactgcagcctcgaactcctgggctcaagtgatcctccacctctgcctcccgagtagctgggactatatatgtgtggcaccacgcctggcaattttttttttcatttttttgtagagatagagtcactctctgtcacccaggctggagggcagtggcataatcacagctcactgcctcagccttccaggatcaagtaattttcttgtctgtatagctgagatgacaggcatgcaccactgcgcccagctaatttttaaagtttatttatttatttattcattcattcatttcattcattcattatagagatagggtctcactttgctgcccaggctgatttcaaactcctggcttcacgctgtcctcctgcctgcacctcccaaagtgctgggattacaggcgtgagctgcagcacccagcactaaattaattcttgatctgtatatttattcacatttctgtaagataggaatagaagagactgtgaagttagaatttgacccacctggcacatgttgttgtttataatattaatggttaagagcaggagagttcattttgaatactacctattaaggacatgatctgccagtaaaacatctccgcacctgagtatgtgtcaatactttgcaaacctaatttaatccccgcctattttgaatttatgataattcagctgggctgccctgaagttgtttaatgtatgtagaaaagcagattaatggtgtaaacaagattattgggagaacacttaagaaaacaagacttttcaagtactttggtagcattcatttacataaacaccctacatgttaattacgattgagtattatctattcattaaagcaagcttgctgggtctctacttggcaaaagctctgctcgttttgacagatgcttaaaagtgatcgaaattgcagttctttttatatgttctatcatttcgaatttgcactaattttcttattacagtgagaaatttttgtctctgcttttcattttattaggcagtggaaattggaacatttgtgttacaaatcaggagagcttatcacagaaacaggttacatggatcaggtatattttcttcttgttggcaaaaatttctcaggaacaccccagtagtgtgccttaacctaacgcatggcctcttctttttaactttgacagataatagaatatctttacccttgtttgattattacacctttggactgcttctgggaaggggcgaaattacagtctgggacagcatacctcctgtaagtgtgtgatcatgctttctgatgtctgtgacttctctaggactcagtgtttctaatgttgcttatcattgtttgttccatttcagttttgaacaagaaataaaaacattgaaattccatgtgcattttttgagtgaatagtcgggggagaggggatttcagcagaatgttttttctcttttcaaaaaacaattctgtaggcgtcattaaatttcattcacttttaccaacctatttatatgcaaataaaatgcaaattattgcagagtacgtgtgattttttaactctttaaaatgttcgtagtttcgaagacgaggcatttagacacttattttttaaggagagactttattagtgagtgggttcacatcagaatgaaatattttgagtttgagatcttcctgtgaagtaaaaagctaacctttctttagatcacactaatggcatttaagggggaaatccactatctgtgaaggccacagtagggaatgtttcaccgtttagcagttggatattatatataccgcatcatttagagaataattgttaatcagcatagacattttcagttaattatgcaagagtgagagcttgggttattgtttctgtcctggcttgcacatatctgcaaaagcaatttgcagtggccatcccctgaccttcagtgtacagttttagatgggaaataaggggttttgtgttttctggttgggagattccgaataatgacttcagcctggttaagcagctacagtgtggtttgaaccacataacaggcagccaaaagcctttctggtctgtcaacagcacagattcaaaagtgagtgtggggggaagtggctgtgatggtggtgatggcagaggctgcagggggcttgcccattccattgccaggctgtcagagagcgctcataagtatgggattgttaaaggtagcagagatcaaatattttgattgatgacatttacaaagtatttatttggctgccaagtgctaatttgatattgtgacgccctcttttttaaaaaaaaaaaaatttaattttggatctgtctttttggctaattttgtatgtagatattaaatatacaatatcagcaattaaagattattcagtgccctcattaacttatgagtcctctctctgcttagcatcttcagtcatgaattattttcctgacctaagtttttatgcagatatgctggaaaggagcatttgttttgatgccagagtcccagaactgcagcattgccaggaacctcctacaaggtggatgcagtgggcgcagccgtgttactttacgatgcgtttagaaggctcttttcatggtctcgtctcctaatttcttttgcagaggtaaacctcctttgcggtggacaaacttcgaccctttggaattcctggaagagttaaagaaaataaactatcaagtggacagctgggaggaaatgctgaataaggctgaggttggtcatggttacatggaccgcccctgcctcaatccggccgatccagactgccccgccacagcccccaacaaaaattcaaccaaagtgagtaccagcagtgagcgctctcagaagggtggagagcaaaacacttttttgtgtccattcatcgttcactttattattttcatttttaacatttcattctccatgatcgtctttgtctatggaactaagtttatttatagagctaaattttgctgtaagatttgccatacacctcccattagccttgctattaatgttctctctgaaacacacaagcccttaatgcactggattttaacaaggcatgtgacctgcctactaattcccataattatgtggctgtctttttattttagcctcttgatatggcccttgttttgaatggtggatgtcatggcttatccagaaagtatatgcactggcaggaggagttgattgtgggtggcacagtcaagaacagcactggaaaactcgtcaggtaagccagctcccgaggacaatctatgccctgtagtcttcttcctttcctcaaaagccacttccctcctgacatcggcaagtgtatttgtattaatacttaaaccgttatcctcgctagccaggtggcgtcatagaatattaagaaatagtagcagactgcaacagcttgaaaaagcaccttgtggggaatttttcaagaatggatttgtagttttcatcaggaccatagttcctgactatagggtttaaggagatctgcccattaggtagagaatgggagcaggtgtaaagtaggccgggacacactggtcagagagagttggtggtgcgagctgcacagtgtcatagactgttagcaaaagatggagagccagcggctcaataagaattatcctttgtgcacttgtggactctggtcagtcaggtgtctggcgtttcgtgtaagatttctcccttgggaacgccaccgtctgggatttctgcacagcaagtatgcgtcactgagcccggtgtatctgttcaagctatctgctcctctccccttcctgtttcatggaatggaaactgtgaaaggaaattgcctattaatttaattttggggtatatctgtaaaaggtttgtaaggttatacctttaatatggtacatcaatctattaaataaaataaccatcctggtcccattttaatggaaacatgtgctcacagagaaggaaaagaattgcagccagtgagttgggggagctggctggggatttgaggcagtggaaactgcttcctgggaatactgatgatgtgccttcccttggactgtgctgcagcgcccatgccctgcagaccatgttccagttaatgactcccaagcaaatgtacgagcacttcaaggggtacgagtatgtctcacacatcaactggaacgaggacaaagcggcagccatcctggaggcctggcagaggacatatgtggaggtaaacccaccttcgaatcggcgtgcagactcgctggttatgcaattcttcattttcaccattatttaaaacatttctttccattcgctttattttcaaaacattgcaattctgggaacttgatgggatgaaaacttttttcctcttctttgatattgaaaatcctgggataatatctaaaagactagttctaattggggtgccctgagacatgtttagtaaccagttgtgaattccagaactaaagcacataacagtgtttaaaaaaacacttggttagcaaaggtgtctggaaaacattagcaaggcatagaatctgttcacagctgcaggccccttggtcaggtcatgtgacaggagctggcctttgtttcccaagcagtgacctctactgagctgcatgtgaccttttaaaagtggccagcaaatgaacagggggaggagggccataagaatgagttgttttggattagtggggagccgatgggaccgcaagtcaattgtgaagttaacggagaagagacgagcagtctcagccctggagtaaatacagcactcagagtgaactccagcgacaccagccctcagcagcacccactgccactgattagccatggcccttgtcctaaaacagggttctttaatgttagcccaacttcagcttctctccctgccctggaatcacgtagaacttttttaaaaaatgcatcagaaaaaaagaagggctgcgctgtgtcacctgagatctgtgctgtcgaggcttgtggaagtgttcattgcatttgggcatttcgcattctgttgtgaccacaggtggttcatcagagtgtcgcacagaactccactcaaaaggtgctttccttcaccaccacgaccctggacgacatcctgaaatccttctctgacgtcagtgtcatccgcgtggccagcggctacttactcatggtaacgctcgatgccatgctcctgggggctggagtttggtttggttgttttagtctttacttttccatgactgctcctgcttcttaactgctcttaacatcgatgtgcatccaggacagagagagcgtggcttcacagtggtttaaaagtggtcgtgtaaagcatttttcccatttgccgtttgcctacctttgactcctgtcattttatgtgacgcccttgatgtaaagttttgttgttgttggataagttctgccttttgatttggggtgatgggtggagggaaacattagaatcacaacacattctaatgttcggcttttgttctgtgcccccattgttctgcttgcagctcgcctatgcctgtctaaccatgctgcgctgggactgctccaagtcccagggtgccgtggggctggctggcgtcctgctggttgcactgtcagtggctgcaggactgggcctgtgctcattgatcggaatttcctttaacgctgcaacaactcaggtactaaaggagccatttatctgctgtccgttgacaaatgccacccggcccccaggcttggcccagccagcctcctgtgtgctgtgtgtccttctcaccggaagggtcttgcagccttttccactaggatgctactggtttcaggggaatgctgtctcttgatgctgtccgccctcagggaagtgggtaggaagtctgttgggcttattggttagtagagacacttggctgataggaatgtatgtcattgaccagggttgtggctcttcagctctggtgggcatttgcatggcttgcagggcttgtgaaagctccgattgccaggccccacccccagagtttctcagtaagtctggggccggggctgagaatgtgcacttcagggcaattcccagtgatgctggtccatgggccacactctgccaatcattgcttaaatgagttggattccttctcatttactagcttaaaaaatgatagtacactgactttcgaagtagaaacgtgcaggatctcctgtgagctgaaatggctaggctttgggacgtcaagtgaattcttcaccatgaggttacggaagccctgcttcaggagctgttaggtgctggtggcagagtcctaactagctttagaatcatctgaattgcatctcgcatgtctaatgccaccatcctctgtttttgctgtaggttttgccatttctcgctcttggtgttggtgtggatgatgtttttcttctggcccacgccttcagtgaaacaggacagaataaaagaatcccttttgaggtaatgcaaaaacaaaagaagagagctttggggacatcacagcttcctctgttcctaagtatttgtcctttaattttcctcagtctgacccagtaaagatttcagtcccatgtcagatgatgtgtcactggctgccagtcaatgaaataagctggaagactctcaggacatgtatttgctatgagaagtcccaagagctgcatctcgggtgcctttaggaatacgggtgtttgttttaatgtgacactttatccctaactgccatacattcccagagcctgcatttgcttctctggagatgtctgtcacttagccatcacctccctccactcccttttaaaattatacttaagcgttaagtcattatcttgcagctttcttctctggatggtaataaccatgaagaattgatgactctgtagatggtactgaataatgctggtgttagggggtaaggcaggtggctctgtttccctaatgccagcatgataagctgtaataacagttgtgttattctgccacgtatctgctcacacagtctgtgctccaaggggaccatgtccagtgcagctctcagcgctgtgtttttttattcccaggacaggaccggggagtgcctgaagcgcacaggagccagcgtggccctcacgtccatcagcaatgtcacagccttcttcatggccgcgttaatcccaattcccgctctgcgggcgttctccctccaggtgagcttctggtgatgaaggctgtggtgatcctgaacggggcactgacttccagcatcccatgtctgcggtctctgctaaggcacttcagttacttatgaagtgaaatagaaatgcctgtgtttgaggctctgtttaactgggtggatgctgctttaagcttataaccctgacactccctctaaaaaactaagcccttctggagtttttccttcctttctagccctatgaagcccagacgtctgttgccttatagagtggccatgtcctttatgcatggctttcggggctactccatgttgccctctggggtcaccagcgctgcagccagcttctgggccatcccctgcttccaaacaccactcccagtacctgcacttaccccctctcccgctgcccacttgatcccaaacaggctaccttttctttcgcttttgccaaagcacccccaacccaagacagtattaagctgaggtcgcatgtcagacggcactgcaggaccgcgaactggcgaggctctgtggagaatttcctgcagggtccgcctcggtgggccctttctttccacctccctttcctaagttggccgccacaatctttcctgtcccctcttctctttccttttggtcccctgctcccctctcaggctgcccaagcagactcatgatccctctcaccttcccatgcagagcacgtgggcccctcgtgacttgtcctctccttccagaccaggccccgtcacccccagaggccgtcagggtattttctaatccagactcagcttctgtgaattgtaagcatggacagttccctgggatggggatagagctgtagtccgttctgcgcctggagtaaattactgacgttgcccttgagctacctgaaattcataggaatcctaaaattagttactgcagccagtaaagcagagacttcaccagtttgtgccatggtcttcctgagcgcaaagtggcctggagttttgatatctcaagatgttgtgggggttttgtgaattaatttcaaatttcaaaacctcaattgtttcccctttctttctctgtgatgatatgatgtctaattctcaagctggccaggttgttaaaggaaatgacttctgtgtcactttttcacttgttgttaggatgcccggcacactcacacagctttactctactcaccaagagttcctgcagatgcgagcaggaagagaaattgaccagtcttgcatctggtttctgtttatattttgtcaatatgtttagctctttcctagtctttccatttgtcatgtaagaggaaccaatcaatcacgtatttgaatgtcatttcgctagtaaccaagaggcctgggcaactactgatcctactgggtttgggaatggaggcatctttagtatttagtgtgaggcacagctggagaaaagattctatgccaattaccgtaaccgccagccccaaaagaaacataaaaagaaaagaaaacagggtttatttatattataaatttatatagaagtaaaaatagtgaatcaatgaataacgttcagatctgatgctcgaaccaaagcacaggacaaggaaactctctctgattgctcagtggcatgaaaggtgaaccagactcgcagtgcagctgaagttgtagaatgcctttgtgcgcaggtgtgtgtctgctcagcaccctgtggtaccccagtctcatttcacgtgcagccggtgctggtattgagaaactgttctagagtcttttagtcatgggaccctgtctgcccattctctctcctctccccttcttttctgcttgcctttttgctcactgtctttctgtatctgctcatactccttcttttcttcttttctctctcattctctcctctcctctcttagtacatactgatggctcatcgaggccgactctcctttaatgataccctgtggtgtggtggtctgaaaagctacatgaggtttccttacgaggagtagccttgtagaaaatccagtgcgctaaattctcccaaggtaagcaccttacagagacaaaaatgagtactgttggtttttgtgtttctgtttcaaagcaccacagtatcactgtagaaaattgcaactatagcttccaagagtcctcatcttactgaagaatacctcctcatgacactggttaattctctgtcaaaagaaaaaaggagtgcttcgcacggtggctcacgcctgtaatcccagcactttgggaggccgagacgggtggatcacgaggtcaggagatcgagaccatcctggccaacatggtgaaaccccgtctctactaaaaatacaaaatttgccgggcgcggtggctcacgcctgtaatcccagctactcgggaggctgaggcaggagaatcgcttgaacccgggaggcggaggttgcggtgagctgagatcgtgctattgcactccagcctgggtgacagaacaagactctgtctcaaaaaaaaaaaaaaaaaaaataggatagaaaatgcaaagaaaagagagagtgtgcaatgatttttgcagtggccatcagaaaattttccctggttctcttttaaatgtattgaccctcaaaattggccattatgtagcttctctttccattgatgaacagtatcaggtttgactctgggtgttcagttgtgtttatatttgcaagatgctacagattaaacatcaaaagggagtgacccaaggcggttctgtccaatagtaaacctgcgttaccttcagaattttccatataaaactcctccaattttgtagcctgaccaaataattagatatttttttccacaaggaaactgtcttaaacctcatcagcctttatccatctgcctaaatgccatctctacaccagaaatcactggcatcagctgtaattctttgtaattaactagggcttgctggtagcccagtagtgtttattcttcaatgaaaactcacagaacagaaccccttgttgttctgtctggtctaggagggttcaagtggaacctcctctgcatgtgtcccagccttagctgctttgaggggatggggcatttcctatgagtacaataactagaattgattcacagttgcagtatcatccccatcatcttctctggtttacttacactctcttgcctttgcgacaacccttcttgctttctgagcagcccttgctggttgttttactattttggtgtacacctggggacctggcactgagaaaatactccgccatacatgtagtaggttatgagaaagtcagtaagatgggacgctgcttggggttcttccctcatcccttcatttccgtcatggacacggagcaaggtgcccagcaggcttctctgaccgatgaggccggctggtgcccatgcctgtgcccgtggggctccctgtgtcacgaacctctgctctcctcatcctcatgaacacctgtccaaattgggatgcccagggtctcttctctacattccactcctccattctaaacatgactgattttaaaagctaaaaggattcggcccccaggatgacatctggaaaatctccgttagaatcctacctgttcttcctgccatcccctgctgtctcacggtcaggtgtcctaaccccgtccacagacgtcctctcagtaagggaccagatctcacaaaactcccggttctcagctgagctaggggcttggcatcaagtctttgtttgatctgatttactggataacctcaggcaggtgacttgaccgcacttcggggactttatcaggtaatactgtcaagagcagtgagaacctcctgtttgctatgaatcaggtatgaacgatctgatcttcatagcttctcctttctcttccccaaagtgaatttcaaaccccagcagtactgaggtgcttgagccaggtgtctcctcttgcacactctgtgtttttttcacagggagcacctgccattcccctgctcctgactgatctcttttgcttttcttttttgagacggagtctcactcttgttgcccaggctggagtgcaatggtgcgatctcggctcaccacaacttctgcctcctgggttcaagcagttctcctgcctcagcctcccgagtagctgggattacaggcatgcgccaccacgcctggctaactttgtgtttttagtagagatgggtttctccatgttggtcaggctggtctcgaactccaacctcaggtgatctgcccgcctcggcctcccacagtgctgggattacaggcatgagccactgtgcccggccctctttttcatcttataaaccctgctgaagcctctcccgggaagcctgccttgactgaccacccctccaccccactgagctgctctgcagcctgacacctgccttcatgacgccatccatcattcgagattgtcatttgtgtataggtctggctctgtgagaattgagagtaggattttgtcttatttatctttgtgtctccagcacccagcacagtactagacttttctttttaaaagatctctctctttctcaggtaaattctcttgtcacagtggtgatgagcttatttgtgtaggtctatcagacaggtcttaaatacattagagtggtaagctaacatgcttcatatttttcagttgatgaaggattttcaagatagaccaagaagaaagaggttaggtagtttttagaagaacgctcttgagagggaattaattattggaagacatctctccggaactcaggcttgctggttcaccttcagcataaactcacaattcccatccaaagccctttgtggaagttctccctggattgtgttaggtggcagttatagccaggttttctttcctcaccctaggacgtttatcagtttgagatttgtgaactaagcagttctttgagaagcctcgttttttattttctttctttctttctttcttttttttttttgagacagactctcactctgtcacccaggctggagtgcagtggtgcaatcttggctcactgcaacctccatctcccaggttcaagcaattctcctgcctcagcctcccaagtagctgggactacaggcatgtgccaccacactcaactaattttttgtgtgtttttagtagagacggggtttcaccgtgttagccaggatagtcttgatcaggagatccctgaccccgtgatccacccacctcagcctcgcaaagtgctgggattataggcgtgagccaccgcgcctggcctcgttttttattttcaaagccatgtctggcaatttcctggctcctcagcattgccagtgcttttctctgtggtgccccttctgccgtgcccttccgagctgggtcgacttccaccggcttctgttggcttcccctattaacagcccaattttgtaatttttactaggtcagcagaagatttgccaacgcactgcagaatttagccctgtgtttattctaggttatggagtgacttttgaatctgtacttatttattctgcgtactataatcacacacaggaatttctttctgcttaactctccttgaccttttatgtttcttgctctcacaccccacaggctactccagaggcaatttggaatgtgcctattaaaacctcaggggacacgtgtgaaattgtatttcacgttttaaagggggacattttgatatactcgatccactttatataaaaatgtttaactgtaaaatcagggtcgcgtgacctcttggaagcattctggaagggaactgcttctgtttgttttaaattctatctcgagtgtgctctctgttctgcctttgtggatttggtttggttaggttactagcaacacgttagtagtttagttcccaggtttgtgccttatcggtttatggaattattagagatagaaaggcccagaaacagtcaagactattcctatcaaataggctcttgatgatgtagcaaaagaaactcttaacatctgtcacggtttcaaatgcttcaagaggaaagggaaagaaaaatattgtttaaaagcatctttattttcgaagcagtcctctgattgggcggaggcatgttggtgacctctgaattttttttctgctcccaggcagcggtagtagtggtgttcaattttgccatggttctgctcatttttcctgcaattctcagcatggatttatatcgacgcgaggacaggagactggatattttctgctgttttacaaggtacattttcagactgctgtggccttttgattgggtgcagaatggtgctgtgagagaactctttcagcctgtggacttataaaggaatgtgggtaacggggtttgtgctggtgtggagaacgtaggggagagattggacagaggctgcttccctagggggacatcagagtccctgggcttccttctcccctgccgcagctgaacagtctcacagccctcaagatgctggttccgatgacccctttttccatcatgaactgatgttgccgattgtaggaatgtttcatatctctgcattagagcagaacaagattgaaaaacacccatctagaaaatatatagtcctttgatggtggtttggttttgtttggaattgtgctttgaaggattcatcatcatggaacttgcttttgaaagccaaatttaggatcagtcctccatgtggcctcctcagactgacttttatctagttcaccaggcgatgaaccaggtgatgttatcaaccaggcgatgtttctggaattcagcaatgtgatgtttctctcctaagtcagagctgtgtaaaatgggtattctccgtacacagtgaaaaatggcagaatgaaagcaccatttccctgtttcagcataacattgcaacatgtttcccctcctttcagcccctgcgtcagcagagtgattcaggttgaacctcaggcctacaccgacacacacgacaatacccgctacagccccccacctccctacagcagccacagctttgcccatgaaacgcagattaccatgcagtccactgtccagctccgcacggagtacgacccccacacgcacgtgtactacaccaccgctgagccgcgctccgagatctctgtgcagcccgtcaccgtgacacaggacaccctcagctgccagagcccagagagcaccagctccacaagggacctgctctcccagttctccgactccagcctccactgcctcgagcccccctgtacgaagtggacactctcatcttttgctgagaagcactatgctcctttcctcttgaaaccaaaagccaaggtaatctgccacaacttaaggctcttcctgtcttcaaaaaaataacagaacctttggagttcatcagattgcttctacttttcttctttttccttaaaaaaaaaaaaatttcgtttaagtatgatacatttcagtcctccaaaagtcaatgcttttagagcatagggccattttaatgaggtcatcttccatgggagtgaacctctatgcagcaagtctttttatgaatgaggttgtttaaaaatgtgattattgccacttgcggtggctcatgcctgttaacccagcgctttgggaggctgaggtaggaggattgtttgagccaggagttcgagaacagcctaggcaacaaaggccaaccctgtctctacaaaatattttaaaaattagccagggacaggtgtggtggctcacgcctgtaatcccagcactctgggaggccaaggccagcggattgcttgaacccaggagttcgagaacagcccaggcaacatgatgaaactccatctctacaaaaaattgcctgggcatggtgatgtgcctatagtcccagctgcttaggaggctgaggtgggagggtcactgagcccagggagtcgaggctacagtgagccgtgatggtgccacttcattcaagcctgggtgacagagtaagaccctgtctcaaaagagagggggaaaaaaggcatggtgctgtgtacctgtagtcctagctacttgggcagctgagacaggaggatcatttgagcccaggagttggaggcaacagtgagccctgatcatgccactgcactccatcctgggagacagagtgagatcccaactcagatacataacaaaacaaggctgggcatggtggctcacgcctgtaatcccagcacttggggaggccgaggtgggtggatcacctgaggtcaggagttcaagaccagcctggccaacatggtgaaaccctgtctctactaaaaatacaaaaaaaaatagccaggcgtggtggtgcacacctgtaatcccagctacttgggaggctgaggcacgagaattgcttgaacctgggaggtggaggttacagtgagccgagatggcaccactgcactccagccttggcaacacaagactgtctcaaaaaattatatataaaacaaaacaaaataaaaatgcgattactatgattttatcctttttcctatgggagaacaacccctacaagataaatcagtttaagtgtggtggtgaaaacaaggtattaactagacagcttctctttgtccaggaagagtcagtggtgctccctggggtctgaccttgtgcctcttctgttccaggtagtggtgatcttcctttttctgggcttgctgggggtcagcctttatggcaccacccgagtgagagacgggctggaccttacggacattgtacctcgggaaaccagagaatatgactttattgctgcacaattcaaatacttttctttctacaacatgtatatagtcacccagaaagcagactacccgaatatccagcacttactttacgacctacacaggagtttcagtaacgtgaagtatgtcatgttggaagaaaacaaacagcttcccaaaatgtggctgcactacttcagagactggcttcagggtaagacggcgtgggaggctctcgtcctttcggtcttttgcgtgttcagcttcaacaggttcctttgtcatgattatgagagcgttagattagaatgtaacactgacgtgtttcatggacttttaagagttgctcaagattcttacatgaactgtttctgcagcagcctcccagatctggcttttacctataaaatgatgcagataattcagatgagcttctgtgagaatgtacaagtgcacgtcaggaaaaggggagcatgttgtaacaggtggagccgaggcttctggtgctctttcctcttggatagacggtggctagtttggtgaccacataaaatcaaagtgcggctgggatttccagactgattgccaaattatagcttactgcaccaggagatgctagataagcagtggacatagtcttacactccatattttgaccatctctttaaaaattatctatttctaattgactttgtttttagagcagttttaggttcccaggaaaattgagcagaaggtgctgagatggcccatatcccccttcctcacccacacacagccccctcgactgtaaacatcccgcaccagagggatgcatttgttacagctgatgaacctgcacattattacccaggctccatagtttacggttgggttcattttgaccattttttgatttggtacttgaagtaaagttataaatgcttagtaacatttcacattattttataaataattaaattctgttttaaaatgcctttcttggtggggcacagtggctcacgcctgtaatcccagcactttgggatgccaaggcgggcagatcacctgaggtcaggagttcgagaccagcctggcctactagtgaaaccagctctctactaaaaatacaaaaattagctgggcgtgctggtgggtgcctgtaattccagctactcaggaaactgaggcaggagaatcgcttgaacctgggaggtggaggttgcggtgagcctagattgtgccattgcattccagcctgggcgacaagagcgagactccatctccaaaaataataaataaataacagtgcctttattggcttcttcactcttagaaatgtttctaggaaatattcatcagctggaggggaaaaaaaagtctaaattttctcctgaccgactgcacgtaaatgtatgcagtgattccaggaacatctgttcatttattctgcattgacacatgcaaagccaagtagagaatcaggataattatccacccaattcaagcaaaacacttttactggagtaccaaatcattatggcccccaacattttttggcttggattatccaaatgattgtcttaatttcccacttaattaggcttgtttaaacacagatgtaagtgccttttttggtctgaagtcaatacacttgtatgtaaagactcagcagccagtttccctgagagtttgcaggaaatggtcaacaacttgaggttggtagaggatggttccatacagcttctggccttgacttgtgtttaccagaactttgtgtctacatgtacacccaatttgactttccttttggaggaaggtacagagaacatgccatgattattatttattaacaccctcctgagacgaacgtgaatttgttccaagttttatttttcacatttagtttagaaagcaatggtttttgggataatgagttaaaagagagacagtggagagagtccctgctttcattttccccccattgaccaaagacatataaataacttgccacaaatgacaaagagatctgctgtgccctgccagtctgtgagcagagaagggttattgtagagtgtatttcagtgtctttggccattgctctggaggctcaatgtggcatgttaggcagggattgggaagggggtaaagggggattgtctcgaggcagtgcaaagggttaacctttttatagagcattgtagatcatctctatacgtttcttcctttatagatgtaaatcagctggagttgagtttttttttttaaggtgcatttgaatcatgttttgattgctgtgtgaacagcatacacctagaccaagtgagatccattggtgctaagcaatcagggtcccaggcagccctgggactccatgactgactcttacagggtccgctagagcactcaacacagaatgaccagacactggagccctttgctgcctacacgtttttcaggcctgttgaatggttgatgtggtgtttgaacattttctacaaggaaacaattatccttgagtcagctttccttgctgacatttttgtgtggcttttaaatggtgggagcctcattggtttttaatggaattcccattaaaactatgtcatctcattggtctttatcgacattacaatagtttgtctttgattttttttactcctaaaactatataatggttaatttcaaaactatcccacatgtcacatcttaaaacatacatgcaaataaggcagagtcagataaaaaccatgcctcgagtcatgtacaaatgtgttcatttttatttcacactggattatgcaaacaaaattttgattaacattttacttctagggtcccatagctgaaggaaaatgggcaattggggttattcctttggcctagaactttacattagaaaataattattgacacaaaatattcataagaggagaacttctagctaagatattaaggtttgctgtaaaataagtaaaaagtcacaattttctagagtgtgcatgcattggaatatgaagcactggctaaagggcagtggaaacccaaccttatcccttgttttgtatccagggtcgtaccttgtacatgtgcttaggccagccccttgttacttgagctttttggtgattagtcagaaaatactgtagtaatggggaaagaacttaactgttccagaaagtcgatgactgtttcgtattcatctttgaacccccagtagagtgaatggcacctaagtgaccagcagtgtggattctgagttgaatcgagtttccagcaaggctgacctccccagataggatctttcttcctttgtttcaccctcgggtgtcccagaagtctttgtgtgtgaatatcataaaaccgcccccagattttggggaccccgtttgccaccagatgttattgatgctggagttgaacctgcttgtcttactcctgcctttgacacatccttgggtaccacggtgtgtccccgcactgtaggccagtgagtggctccagctgcctctggtgacttgctgcctgggtttgagctccatccaacactcacctgctgggtggccccctccagtctcccctttccaagactcagttcctccatctgtgaagccggagtgattaactctaacggggctgtcccttggttgccgtgggatgcccagcgccaccccacactcaccaagtgtgagcctctcttcaggattagctggttaagggagaggggcttaaagcccaggacacgtcatgacatcatgaaaattgttacagcgaggaaaacagacgaggcctccctttttgaggggaaaggaggcgcagtaatttttcttctgctgtttattgtttttcaaaaacagaaagaaagggctttcagtaataaaataacatctgctcagtaccctgtgtgtgcatgcctccctatgaaaacccgtctgtctgagaggtgcacggcccacccggtggtctcctgtcccgtctcccctccacgctcaccctgacacagactcctttcaccaccgagcccactgtcatccccaaattgttcctctagccagtagtgtcagaaggagggtttcgcttcttagagagacagaagggggcctgtgctccccctccctccccacacttcagaccccaagagcttaaccattctgagcactaacgcaaccagattttttttgaagcctttgaaatcatccaaggcatgtcccgaaatgaaataaacgcttctcccttcttactagccgtgtccaacccatacatgtacagcttgttcaaaagctgtggtttcctgagctgctggggcttgggagctctacttgggaggtggctgggaggggcaagggtgggtggggggaggggggtgtcccggagagcgtgcgcaccagccagcgctcagaccctaaggccgggtcaccggggccctgttttctcttccaacatgcttatctctttacagctgcagccaaaccgtcaggtctgtaatgatggttttgattactgaggccaagcgcagctgtgtgtggtgtgctggcgggctcgcccatcccccaggcccagaaagctctttcctccccctccccggcttgtggtttgtcatctgttctcacagagcctccttgtattggcctgtggcttcctgttctcaatcggatccaaatttaccctgtgaggtatttccctgcgtgcacacgagcgccttcccttccttctcctccaccccctctcctgaggaagggtggcagagaggaagagagcagtcgagagtgaataggtgttggctgtgatctttacacaacctggcagcggatcccacagcttgtgttagctccacaagtcgaacagatggaacaaattgacagaatcgtgttcgctcaccctgggctccagaagcagctgagctgctgtttgaagttgggggagtttgaatgtgctttttcccctctgtgtggaatttctggttgtattgaagaactcatgacttagcaccccgagtggcacgaaacggttaatgaccctggtgcgtgtctttccgtcgcactcttgccttcttttgtaattgtcatggggcgaaaggaggagagtggtttttcttaagataaaatatgagtatttgtttcatagaaacagataatctccttccccccttttgagcagtggctggcagcagctgcagttcattcatgaaagatccagtgctttcagtcaaagtggatgtgggacacagagggtgtgtttctgatggacgtctaagagccccctgccctgctcagtctcctcagcccaccccgctaggaccagggtccttctggctgcgagttataatgtgttacaatcatttgccatttctaggacttcaggatgcatttgacagtgactgggaaaccgggaaaatcatgccaaacaattacaagaatggatcagacgatggagtccttgcctacaaactcctggtgcaaaccggcagccgcgataagcccatcgacatcagccaggtactccagctgctgggcactgagggcgcttccagggctgcggggccgctgccctggtggaggctgcttgacagcgtgtgaccccaccctgtgctctctggagacctaaggcactgggagctggtagaaagaatattgggtgactctaattcacctcctcccaccagctaattgtgtgacctcaggccagccagtgcacctcactttcctcatctgtcaaatgggacaggcgtgttcctaccaccagaacaattgtcagaataaagtgcagccaagagagtgcaggctctttccaatgttagaaatgcagcggcgtgtgattctttcagttctaggactcggtaccttgttggtcttgatggtattcaagcttggaaagatggatttcttgggtagcagtcatttggatgagcagaatttggggtaggtgggtgggttaggagattggagaggtgacagaaggatgggaagatttgttacatttgagatctttgggtggccctggccccaggagtagacagatcgctctgtgatgagtgaagcaaacggaaatgtgcacccttggaatcagagtggctgcgccattctgctcactcctgcagtaataaccgtttctgtttgggaatcatattctccacttgtgtttgcatcttcttgctgccatttggattccagcataccccttttggttctgcaggtgtgttcaggagtgtgttttggactcctccaattgcacggggcccgggctacctcagcttcctcggagcctcttcccttggctctttgtagcttgcttgcttcaccttcaggcagaaaaccgtcatgctaatgatcttctcagcagctatgtttattgtctccccttttttgctggcattcaaggtgacagatttacaaagtacattgttcagagttgttatggagtgtgaaactctgagctcacagcagcaggcagcagaccatcacgtttcccaaggatgcaggcagaggagtctgcctcagagacaccaggaaagtgcccaggcagcagggctgggcgagggaccagggatactgtgggacaaatgggattgggccagacccccagataccatttcctcctcccgggagggagaaaggcgtgctgcatgcacagaggccacgggctgcgctgtttgattccagggatgtgttgaggacatgcagttgttacatatcctgtggattaattgaatccagatccccgaaatccagttctctcactctctccctgctccttcttccttcactccttctctaggagccgctgtcactggtgtttttcattttgtttaaaaaagacccaaagcgaggaatgaggcctgaatctaaaataaacaggaaacggaatttttctatgtatataaaacgtacaaacacatactgagtcccacagagttccccacctcagcaaagcccacaagccctcctgccgagggagcacatttggccacgcagaggacgcggcgtgcggagtactacgacctccgggaataagatcacctggcgaggcttgagggtgtgcactcgtcccttgcactttctggcgctgggcattttttgaatccacaggtcataggaggctagtgttagcaaaatttatacagatgttgttttatttttatagctctcctccatttactgggtggcatttccttcagtgttaacaacagaggttaactgcacacagacgtgcatggggattcttgccaggtttctcccccttcccctcctataaatatgtttctccagattgttcattctctgccttggctgcagacggtcttttagcattcagatttaattggttcagccaattcctgggccatctgcagaactgtgtttgttataaacacgccagtgattgcatcctccgataagtgcacattgaaagaaatcaaaggtgttctgatgggattttcgacactttcaacagtaggcattctattctttgttgtaatgctgtgcgaagctcagcttctgtgctctcaaggcagaagtgtgtttacccccaaccccattctcaaaggcctctgttcttcccgtttttgtagttgactaaacagcgtctggtggatgcagatggcatcattaatcccagcgctttctacatctacctgacggcttgggtcagcaacgaccccgtcgcgtatgctgcctcccaggccaacatccggccacaccgaccagaatgggtccacgacaaagccgactacatgcctgaaacaaggctgagaagtaagtagcgttttatcgggaggtctgggaacttacagaggtgccttccctggttctccaaactcagcaacagccttcatccgttgacgctacccagggttcagaagtgtaaacagaacaatctatttcttctcgtttaaaactctgggagacgaggatgtgtaatgggatacaacccccgcactctatcacattgggaaatcagtgtctcgtctccattcgtagctttaatgctaagacgttcattaggcgttgctctcacgtgccagctgttccctgtgaacaccggggacgcctccaggttaagtgttattttactattgcagagttttatcgctggggattatatgtttatcttaactttgtcaactctggtgttgaagggatttttggcacattgggtcattcctataagccaccaagcacctgcactgtgtcaaagctgtttaaaccggagcagaaaagtctgtatacaacagcgtcctcttcctttcacctctcagcccagagtttgaaaggtggttctgtgtggatttcatttgcatttctggtggagatattagtagcgtatgctttggataccgggccaagggaggatgtgagaaagaagacgggtccccttgcaaacatggctggagactcagcgagtagtgcttccccggatccagtgctgcccagagccctgtggcaggcagccaaggcttgtcttaatgaaaatttatagttgagattataatagggcaaatcatgtttagcaagtcaactgaatgaccccagagggtctggaacacacaacggcagtaactaaatgcttgttgtgtaaggatttcttcccctgttgctgaagacttagcattgcattagaaaagaagcatacaaggttgaagtttgttcaggcactaaaaggataagttaagcatttttctcaggaaagcatgactcttgagttcttttgctcttgcaagtgattgaataaaactgtgtgaacttggtattttcatatgtgtcaagggaacaaaaaaatgttcccaaaatgtaagcctggagtttttagacccctcacaaagaatgactgctggaagattaaaatcaaatcttaaaaaatacacacatcacagagttaaacatttttaaaccaaatgggaagatcgtaaaggcctggaggctatgatcagcattgtttgttctttgtatcatgtagaagagcagtcagtaagctttcatgcaaagttcttctctctttccattgaaactgtgatgctcttctaccctgggctgctcctaacctgtgcccttctctgtccagtcccggcagcagagcccatcgagtatgcccagttccctttctacctcaacggcttgcgggacacctcagactttgtggaggcaattgaaaaagtaaggaccatctgcagcaactatacgagcctggggctgtccagttaccccaacggctaccccttcctcttctgggagcagtacatcggcctccgccactggctgctgctgttcatcagcgtggtgttggcctgcacattcctcgtgtgcgctgtcttccttctgaacccctggacggccgggatcattgtgagtgtattataaggggctttgtggaagtcaaattcctttcagcatagctctttctgcagccgggaagttttgtttatgtctgggcctctggaggagggtatagcttgcatcatccgtaatatgtttattctactcgaggtggtgaggtccatggttaaggtagaacctctaatggccttattcgtaggtcctctctcctgtagcttgaagatttttgtggaaagataggggactttttaaagcacaccttccatcacagctctgaacatttattaaatcaaaacactcaaagcctagctcattttttctttaattgaaaagtgtcattttgtgacctcatccaggcctaataacgacatagcaggttcttctgcatttaacatgaagggacaatcagagaagttaggagagtgatatatggagaaaatgattttgtgtgttttaagtcctgggggaaaatgataaactaatattacgaacctgttttttggcatcccttctccaaaatactctcagattttgatgtaagtttcatgtagagtctaataaaaccgtggcaatgtttaaattctgtgaactatggtatagcctttaaaatgccaaaattataaaaacaaaggccagattttgtgtctgcaccgtgagtctgtgcagcaggtacattaaaaggtaaatgtttagtctgtgagagttttcatggcacttagcaattgatgttgtccatctttcatcattccttcccctccctccacctctgcccaccacccacccccagagaagaaagatcatttttctccttctcttccatctggtaacttgttgtttatttgtatcttctccgctttggaccaagaaactccaaatctaactcacagattttatttccatttccccacaaatttttacaaggaagatgaaaggcaagaagcttttccttggattttaacagttggctcagtccaccccagctgtccccagctcttcaaagtgcagggctcctgtaacctgacagcgtcagctgatgacgacctccccgcttacctggcccccacatcatctttgcttagcctgcaggttcactcacaaaagcaaaactactttgacctgcaaatcttttattcaccccgtcctatcagctttctttagaatggagagtgaggcaaccaaaaacttaatgatgggttcacggatggtctctggcggctgagacccaagcaggaggagagatgggtcttgttgtaaactgtgaaattcgcagctaagtgatgcggccatgcttgtgcaattcctcgtggattgcgctggtggagttgttctgtatgttttttgctttctggagaaggtacattggaaaataatttgcattagaacactctactttgccttctacagctttacacatcagctgtcccacagtctcccttcccagcgggaagatgaattaggcagtaaaggcagtgtccagagttaaagcaagtcagtccattcattgttttgatctgaaccgaggacaccttagccctctggcgacctcccttgtgggcagccccagagggtgacctgcccgcccactgaccactgtgtgccctgctccaggtgatggtcctggcgctgatgacggtcgagctgttcggcatgatgggcctcatcggaatcaagctcagtgccgtgcccgtggtcatcctgatcgcttctgttggcataggagtggagttcaccgttcacgttgctttggtatgggagacatttgaagcaaaaactttgtgaaaaaacaacccatttcctctggctctgtttgtctccaagtgggaaccttgcattctccctgtgcgtggcagtgaaaaggcctcagggcacaggggccccctaggagagcctgcaagatttctggattcctttccctcaagggaggctaaggagaggggtatggaaggtacatggcagcgggccctgtcagccgtaggcagtgcagggttggtgtgttggagtgggccttgaagggccgtgctcacctgactttgactgtcattatacccccacgattcctgacgttgtgacgtttgttcataaggcggattatgtggtgagtgtgtgggtgggcatacacagagttttaaaaacaacaggaacagtggggataaaatgagaccacactcacaggcttggggatggcatcactgaggatgaggtgagctggcagccaaggaagtaccctcgggcttaggagtggaggctccattgttcagccccggggaactggctcttctacctaagcccacccagttcctcagacctcccagcctctacattcatgatagcagaaagtaagagaaccagtgttgctttcaacagacatttttttccctctctttttctctatcttgccctgtgaatgctttgttggaggtaattaaacttcagaaggaatctttagtccaagagataaatctgttgtatacatttatcaaagaattatccaaaacatcacaactgtgtaaattatgttctgtctgcagattagagcctaagaacttggggttatcagtaggcattcaataagtaaatgcgttcacctgttaaatatcgacgtgcgaaataccctagctaggaagccagcactgggcttgaccaaatcacttccgccattgcttttgcaatctctagcacaggtttcctttgggctcagcacatggcacatgcatgtctccacataggctgcagccttgtgccttctgcagtctttccagggctactgtgatacaattgagagattgtaaacttttgtgttttggaaggaatgctttgttgaagttatcccattttttttacagtgtatcataaaaagccaataatatggcaacagtattctctaaattttgagcctgctcaaattattttcttcctttgagctgggaggagggactatttttttaaaaagaagagtgccagcctagagtttagaaaacccataattccaatacagttcttcaaaagggagataaatttgcatgtgagttaagaatccataagttattttattctgatgcaaatggaaaccaccttttttggaagctagcagggcaaatgggtatcccagagcagatttttaccatggaaatgctaactgcagtctctaaactctaggacttctagtccaagtcattttcagtattctgatcctctatgtgaaattgcatttagagttggcagttattgctctttcaaggtttgtaaaatggtagaataaggctgtgaagaagagtcttctttcatgaatgtctttaggaaatcagtgggttcccgttcatttgctgtctcagtaacatagaaacagtgtgtgacagggtagtcacaactaggcccttatggcctcatggcccaaatatgatgcaagccagcatggctgaaaaacccctttggtgccttgccccaagagcagaaggcagctatattgaccctaatgtctttaccaactctgaaagagtagaacctgtttgagagaaaagtatgaaaactcttagcacacctttgtatatttgtattttttcatctgttaaggagaacgaccgtctcagtccttctgcaggtaggtaagggatagaaacgcatcctgccaaagacacccagccctctcctctcggcataatccagagcagcctgaacttcagagagagaacttgtgccaggttcaacactccctgcaggggtcacacgttcaggccaacagtctgatcttccagaatttactctgcaaagttcccgtttagttatcaacagcatttctggcctaggagagctttaggactgcaggagagacagggatgtgtccacacaatgttcagaagggcttgattcaaatgtacggtcctgtgtatttcttgcaatacactcatagtgcttagatgtactacaaacatagcctgaaacagtgacagaaggtctcacctctgcataatcgtgaggaagtgtgtgtagcacccaattgcttgggacactgagctaagctcttagccatccaatgcattagccagaatcctgtgctgtgggaattggaggtctcacgtgtgagtggtgtgagatcatttaaggaggggggaaacttcggggtgagtatcagtgaaaagaaggggacatttctgtccatttttatatagttttgattttactgtgttcaagatttacgtcaacaccaaatatgacccagtgtcatgaagaggtcatcttagtttaagtctaggtgctgctagttgagctactctgattacacattctagcaactaaaacagtaagatgtgagcagttctgagagcttgtaacatttaggacagagctgagcatttaccaggtgaagtccagcaacctgatcttgtgaacatcctcattgcacaggcctttctgacggccatcggcgacaagaaccgcagggctgtgcttgccctggagcacatgtttgcacccgtcctggatggcgccgtgtccactctgctgggagtgctgatgctggcgggatctgagttcgacttcattgtcaggtaagcaggcgtgtgcaaggagacatgttttagaaatcattgtgattgggccgggtgcagtggctcacgcctgtaatcccagcactttaggaggccgaggcgggtggatcagaaggtcaaggagttcaagaccagcctggccaagatggtgaaactcatctccactcaaaatacaaaaattagccgggcgtggtggtgggtgcctgtaatcccagctacttgggaggctgaggcagagaattgctcgaacccgggaggcggaggttgcagtgagctgagattgcgccactacactccagcctgggtgacagagcgagattctgtctcaaaaaaaaaaatattgttattagctcaggtgatcttcgttgcttatttccttctgtatctggtagattgcagcacctcgtcatcgtgactctgctttcttttgaacttgttaacgtagagatattcggaggtataaagacaagctctcttctagagctgtcttggggagtatcttgaaaacagaaggtaaaggatttggggctggcagcaaagacaactctgcagcttgaagccaaaggatcacccaataggtggcccattattgtctcgggttagaaacactgcagaaagaaatgccacatttgacctacgctccctctccttcaaactgtagaaaggaaaacttaaaaatacctaaaattgtcacctgactttattcttttaagaagtgaaaatgacgtgctcagatttcatattcgagtccccacaattaggaagcatttagcattggactttggtgtcaactcttgggaatctaagcctagtttggatctcaaggcaagtcgtttccagttgatttaattaagaatatgactttgtgaaatataaaagaacagtgagttttccttttgaaaagaatttgagaactgcagaggaggaaaccacttgcttctttgagcagcctccatggctttgtgagggacctgctcttggatagaactctgctactttatggagctctaaggccagaatcaccaataagtaaaagatagtccaggattagaaccatgacagggcagaaccagatgtgagaaatgattggtttgtttggcacgcttcagtactgagaggttgtgtgtgtgtgtgtgtgtgtgtgtgtgtcagagagagagatacgcttcttatcttcaagtaaaaagaagagggtttcaactagaagttttagccaaagttttattacgggaaagagatgagtccattggttggcctgtggcatagcccactgggcaatttggcatcatggaggccgccttcttagaatgagtgccaagcttgcttattgtagtttttgcatagagtgaatggtgaagtggaatcgctgtagaccagcgcttctcacaccgatgtgctgaggaatcatctgagggtctaagtgcagggccgatttcggggggcgggaggtgggatgagggctgggtctgcatctccagctacctccctgcaatgtccatggagctagacttctcagcacaaactactgctaagccagcaagccagttcctaaattcctgtttgccaataccaagtagagagttgcccaactgagttaaatgttttggtctgtgttttattttagttcttagtttgattttagcttttcctttgttcttagtatacactttttcaggcactaacgttatcattatgatataaaagctcaatgtcaagtagagtttcttttgcatatttactttctcgtttaacacaaatataacaagcaccccataagtgccatttgcacaacagcaaataatggggacccccatatccctctgtgtagcctaaggtcttttaggggagagacaagttcacaggcaaaaccaggggaaatgcaaggtgtgctggggtctcatgagttacaggagggtctcgctcagccttgtgggggatgctgaatgaggaaacttagcctgaattagagcccccagctggaaacctggcagctggaatcccagcgctctcctctcagccggggttgttcccgcccagaaatatcagggttcctctttcaagcacttaaaagggcttcccattttctaggatgggatggattaacctgataaaggcctcaccaaggtcaaataaatgagcagacactgtatatgctaagccgtcagaaatctaattggcctgtttatgcttcagctagatggatgggatgcaaatgtcttaatgtggctgctgatacatgccccagccgaaagttccagcagtttacattagaccaagacattggctgcttggtttttactaatgtagttcagaagtttctagtgtttacaatagctgtgaggtatttgtatttttatggggattctctctcctttcatctgatgtcaaaacatatatagacatggcagcactggttgcctgttccattttatgaaccagaggaccattaacagatagatatcttgccccccccttcccagaacatcctgagcctctcccctaccccagcccacttccatcagagttgccctagaaatcattagttccagaaacgcatccctgcgtggagtctgtgccctccagccatgcagagtgtctgccagaggctgtccctggctgacaggtttaccttggtattcatgaaggattccagaccttagccctcaatggtgggaaagcagaactacttctgcactctcctcctctgccatggtgctgcggcctttatgtttgaattggctgacgcaaaacaagagtattcagagatgctaaattgttcaacaaaagattggcccgcagagcagccccgccattgtggagtgccctcacccagcacaatgccccagctcccacagaatgggcagcattttctttgcagaaagctggttcctgtgttctaaaaaggttgcaattggagctatttggtaaaactggaactcacagaattctaggcagaaagttgtgattaatgaaaggccagggaaagccttacctgatatgctagagacttaattagagattctgccgtaagatgcagaagcatttcacagtggattagcagcctgcagaagtgggctgcttttcctcctgggctaaattgtttaaattctacacccttcacttcatttgtttgcttctgctgggttttcacgagcggggcccctcggcattgtgtttgtgctttcagtctgcccagccattcaggtcgcattccatatttttgtgtttgtgtaacacattcataaataacattacatgccatcagagttcagcaaattaacaaactaattttttttttcttcccttcatgaactaacactttgggttgtggaatgtagtcctcaaagtcataaggtaaagaaacaaaaagcaaaaactcaccttgtgttgaatgtgaactgcggttggataacagccttttcagtggggtgggttttgttcatttctggcgttgccatgctgctgtgtcgggcacacggagggtggcgcgatccaccctgtcacagcgcgtgttcccgtttcctcttgatctcccaggtatttctttgctgtgctggcgatcctcaccatcctcggcgttctcaatgggctggttttgcttcccgtgcttttgtctttctttggaccatatcctgaggtcagtagtgacacggggatgtcccacgtgtaggccggctgaatgctgtgtttcctgtgccgctcttcacttcgatacttaggtgcctccccacttgctggtggttcttcagtaaacatctcagagtcatgtctgttttcctcttcggtgtactggctttgagggctagagggcgggttcggtttggttcctctaaatcaactgattggcagcctgggtcttacagatctttatacagtaaatgaagactttccccttgagatgcataattggacttcacaagagtaaaaagtacacatcctgcctttccagtgtggagcagaggacagttcttctgctccagctgcgggacctgaaggtcctccaggtggtagagaaggggaggttaatacggcacagtgcgcagggccccagggcagggaacagaggcccctgaaaaataccgtgctttgagctttgagtgtggccagcaggtaaatggacaagaacacttttaacatggaatccccttaaataggtgtctccagccaacggcttgaaccgcctgcccacaccctcccctgagccaccccccagcgtggtccgcttcgccatgccgcccggccacacgcacagcgggtctgattcctccgactcggagtatagttcccagacgacagtgtcaggcctcagcgaggagcttcggcactacgaggcccagcagggcgcgggaggccctgcccaccaagtgatcgtggaagccacagaaaaccccgtcttcgcccactccactgtaagtgactctgcagaaccagggggaggggtcttcccaccgtggtagtgggcctggaggtccagcgggggctcctgtctgctgagcagcacatcacacaggcagatgggatgcagagataaggtacagactaggtcaaatcataggaaataaccagtatttaactctttctcaactatacaaatgccatcttcctgtggtttgatctcataaaggataaaaagggcaggggccagtaatgtcactgcacaaagcagtagcatctatcttgttcagggtgaggacagtttgggcttcaaaggccagagataaagcattcctgccttttttttttttttcctcttaaggtgcatgtcatttgagagtgatattttctaaaactagtagtatttttattgccaacagaggtcaggttttttccttctctcatttctgttaggtttcaatgcccttgatacaacattcattattattgtctaaatactttaccatagcttttggggctccaagctcatgttccaggtggcaggaaagagcagagaggccaagaaccacccctgagttcttagccttcagtgattcaggaggtcaccaggagcctgggagcccctcctcggaggctccaaggacctgggtcctttcctccaccctgtgctccctgggatgggctcagccctgaaaactcaaggaaggttctgggctgatgttgctccactgagggccccctgctgtccctccaggaaatgggtattccagtcccaggccagagcagcccttccgtgaaagagagaaaggccaaccaaataacctgaattgtcctcctcctaccccccgcgacgacgcccgctgagctgcagtgtgaatctggttttgttcagcaggagcctaaaaataggtacaagctgaacgactttgaagttggtcacggtccttttgattgatgtggccactgtgttgctctgtgctttgtatagagacgcagagaccagattcttaacaatcagatggaacaggctgcccgccacagccctccgcagtgacgaaaatgccctctctgctttccaggatgggagccaccggccacacgtggctgtggagcacttgaaatgtggccggggctaccgaggagctggattttggattttagttcattaaaacttaagcaaccacatgtctggagcggctactgtgtttgacagagtaggcagagacagtcctgccagcgtcctgcactcaggccagccagggccgcacacttagcaacttcgggagaggggcagctcagagcctgcagaacctaacagggtcgggggcaggttgtggggggcagcagcttggatgctctgaccacagcccacatttatgggcagcagcagtacgtgtccagccagccgtgtcagagaaagcctggaaacaggattttcaaacaacacgctcctccgccaggtcctggaggttattagaaggacaggcttttcttttgtgggtggaaggcccccattggctccccagggttgactgagtctttggtgaaacccaaggagggaagtgtgggagctgcggggaccatgcccagcctgggataccacccttctaacccaccctcaccctctgcaggtggtccatcccgaatccaggcatcacccaccctcgaacccgagacagcagccccacctggactcagggtccctgcctcccggacggcaaggccagcagccccgcagggacccccccagagaaggcttgtggccacccccctacagaccgcgcagagacgcttttgaaatttctactgaagggcattctggccctagcaatagggcccgctggggccctcgcggggcccgttctcacaaccctcggaacccagcgtccactgccatgggcagctccgtgcccggctactgccagcccatcaccactgtgacggcttctgcctccgtgactgtcgccgtgcacccgccgcctgtccctgggcctgggcggaacccccgagggggactctgcccaggctaccctgagactgaccacggcctgtttgaggacccccacgtgcctttccacgtccggtgtgagaggagggattcgaaggtggaagtcattgagctgcaggacgtggaatgcgaggagaggccccggggaagcagctccaactgaggtgagtgccactgacaagggcagccaagggacctagagccaggcaaagaggaggacaaggttctcctggggttctcggcatccccgaggggctgtggcgctcgggcacatcccacgctggaccccagtgaccttttatccccagagcaaggctgatgtgtccaagctttgtcatccttggggaaccagtccagctccacactgctctcttcccccactgctaacctgcggagggtcggtgcagcgccacaaggacacaaacagcaccaccttttaccaatatttgccagtctttatggaggtgcatgccacagcgaattggtcacatgggaacgcatccgtgtaaccagcccccagatgaagggagaggtcacaagcagcccccagggacacctcaggcccacaccccactctcgtgatttctaataccaaggttactgctgcctgcttttgtactttataaatacggacttgcacacctcttactctgttcaacttccttttttgcttccttttaaagggtgattaaaatctgaagcaaagaggccaaagattggaaaccccccacccccacctctttccagaactgcttgaagagaactggttggagttatggaaaagatgccctgtgccaggacagcagttcattgttactgtaaccgattgtattattttgttaaatatttctataaatatttaagagatgtacacatgtgtaatataggaaggaaggatgtaaagtggtatgatctggggcttctccactcctgccccagagtgtggaggccacagtggggcctctccgtatttgtgcattgggctccgtgccacaaccaagcttcattagtcttaaatttcagcatatgttgctgctgcttaaatattgtataatttacttgtataattctatgcaaatattgcttatgtaataggattattttgtaaaggtttctgtttaaaatattttaaatttgcatatcacaaccctgtggtagtatgaaatgttactgttaactttcaaacacgctatgcgtgataatttttttgtttaatgagcagatatgaagaaagcacgttaatcctggtggcttctctaggtgtcgttgtgtgcggtcctcttgtttggctgtgcgtgtgaacacgtgtgtgagttcaccatgtactgtactgtgattttttttttgtcttgttttgtttctctacactgtctgtaacctgtagtaggctctgacctagtcaggctggaagcgtcaggatatcttttcttcgtgctggtgagggctggccctaaacatccacctaatcctttcaaatcagcccggcaaaagctagactctcctcgtgtctacggcatctcttatgatcattggctgccatccaggaccccaatttgtgcttcagggggataatctccttctctcggatcattgtgatggatgctggaacctcagggtatggagctcacatcagttcatcatggtgggtgttagagaattcggtgacatgcctagtgctgagccttggctgggccatgagagtctgtatactctaaaaagcatgcagcatggtgcccctcttctgaccaacacacacacgacccctcccccaacacccccaaattcaagagtggatgtggccctgtcacaggtagaaaaacctatttagttaattctttcttggcccacagtctcccagaaatgatgttttgagtccctatagtttaaactccctctcttaaatggagcagctggttgaggctttctagatctgtttgcatcttctttaaaactaagtggtgagcatgcattgtggtgtagaggcaggcattatgtaggataagagctccggggggattcttcatgcaccagtgtttagggtacgtgcttcctaagtaaatccaaacattgtctccatcctccccgtcattagtgctctttcaatgtgatgtgggaaagcaggaggatggacacaccccactgaaagatgtaggcaggggcaggtctctcaaccaggcatatttttaaaagttgcttctgtactggttctcttcttttgctctgaggtgtgggctccctcatctcgtaaccagagaccagcacatgtcagggaagcacccagtgtcggctccccatccaaatccacaccagcaccttgttacagacaagaagtcagaggaaagggcggggtccctgcagggctgaagcctaagctactgtgaggcgctcacgagtggcagctcctgttactcccttttaaattacctgggaaatcttaacagaaaggtaatgggcccccagaaatacccacagcatagtgacctcagaccctgatactcaccacaaaacttttaagatgctgattgggagccgcttgtggctgctgggtgtgtgtgtgtgtgtgtgcgtgcgtgcgtgtgtgtgtgtctctgctggggaccctggccacccccctgctgctgtcttggtgcctgtcacccacatggtctgccatcctaacacccagctctgctcagaaaacgtcctgcgtggaggagggatgatgcagaattctgaagtcgacttccctctggctcctggcgtgccctcgctcccttcctgagcccagctcgtgttgcgccggaggctgcgcggcccctgatttctgcatggtgtagaactttctccaatagtcacattggcaaagggagaactggggtgggcggggggtggggctggcagggaattagaatttctctctctcttttaatagttttattttgtctgtcctgtttgttcatttggatgttttaatttttaaaaaaaaaaaaactttgctgatatttataattttgtatcataagaatgttttcctctacagtatttgtcatgccagtttataacaaaaaaaaatgcagggattttatttctattggaaacattacagctatgttttacttttggacagaatttttatttgtatagagtgcttactaatgttaaatagttcagagtatataacatttacattaaggactcatggtaggttttagggtaaggagtttaaaggaaataaatattcaaactgggtctcattgccaattttggtggaaatgagtttgtgtcatttcaattacaaagataaaagtatgccatataatttatttatatgaagatttatttttgtagtgtacatagtagtcatcaagtcttttgacagaagtatatttttaaagaatttatatgtgatgaatccataatgtctggaactttgctgagacatgagtgggcacagttttcattgtaaattacagcaaggaaagaaaatgtttaacagtgttaagagagtcagagcagagtggatattcatgcgattatgaagtgtttattagttaccattggcgacctagcatgcttctcatttcaaaccttggaaggtgaaaatgtacaaactctctaaataattaatgttcaaacactgatagaaattctaacatgaataaaaaataatataacttgttggttatatctttgtttgtagaatgctttttttctttaaaatacttgggagagacagttagtgttggagccatcagaaactgttgtttcatcttgctgaccttgtgacactcttcttttttgctctatctgatggagagagttttaggttttcctcctttttgttttgtataaatagtgggtataagcatagctctgttacatggatgtattacaaagtgggggctgagcttttagtgtgatcatcacccaaatagtgtacattgtacccattaattaatttcttatcacctgaccctatttttgttttctcataccaagaaacttcctaagttaaccatcaaaattagtccttctgtcatctctcttagcatacttatttcccttatgtgatgcctaataatgagggaacataaataaagccaaattcaaagatga

SEQ ID NO: 315 - DNA, 161786 bp, Homo sapiens
attgcctctgtcagtgtgacaggttccacagagctgtcaccctgcaaactcacccttcctccaggagcacaggcgcagagctgcagtggagggtacctgtgtggcttccttgtctgacacagatttgccttcatctggtaagtcccacctcactcccccagttcccaggaaagggctttcttaaaccagcacagccctggaagggcctctcttgtttcaggtgggagaaccagcccttgtggcattctgcagggctttgaagtgaaaagaacacatggatgattattcttgtggtttccctaatctgtgtgcggagggcagaaggagccaggtgatcctgtgtttgaaataaaacaggttactcttctgaaaaaggaggaagcaatttgcttctgtaagtacaaatcctcctgctgaacccctgggccagccacctctagctggctttcaaatgtgacaaattggtgccatttccagtgatggctgtgaggcacttttcacaagctcacttgtttttcagcagctctcacctccacaaagagacaaaggaaaacctagaggcctagactgtggggaagaagtgccagaacaatctgctgaaagttaaaaataagtcttaaagtcagctcactgctgtctgttttccaaggtcagactgactgatgattttagtcaaaacagccaaactagcttccctgtgacctctgttcaaggtggctccccgtggcacacctgatggcatccattcatggtcctactgctcagagggcctatgctgccatgtgtaagagctgaaaaataagcaatgcatgacatcttcttcaatgagcttttataccagtagctattcacagggttcttatgactagctaaaataatttgagaatcaggctctgtgcgatatgttaatatttggatacattttctaatgaaatccctataatctccttacagccctgtgaggagggtactggtcactacccctattttgaagcaggctttcccaatgtgctgattattttctgtctgcctctctcccatgagttctccacccttcactaccctgcactgtgctcagaaggctggtccttacagacagcacaacctgactcccttgtgagctgactttggtaggcctcgggagatcagagtaggaagagaagaggtcagggtgcttctttccaacttcctccgtccttggggagccatttcttgcagcagctgcaactctccatggactactcggcaattggaagcaggcttccctccaaggtgctcatgctcactgggctctgggacagcattttctcctttctgcctcctgcccagatgagtgatggcttcccactgctgctagaccctggatgcctctctggcttgtttgttccctctaccctgtcttcacctccataagtagccacttcattaaagtatcatcatttgaaccaatgtgctattgccaagaccctgaataacacacccagccaaaaaaggtgcaggccagagatgcaaactcatggtattcaacagtaggggaggagaaacataagctgaaaataaaacgaataaaattacaagagctatgagaaagttacagaaagtgttatgggaaatcaaaggccaacaaaaatactttgtagaagatgtaacattgtgttaggcctttgaaaaatggacagaatgtagacagatggatatgaaagagtttcagatatgaacaaagacagcaaggcaaaaaaaaagcacagagcacatcttgggaacagaagtggttcaattgtagaagtggggtaaacttacggatgacgtttttcaaactccattctttttttgagacagggtctcactttgtcacccaggctgaaatgcagtggtacagtcacagctcactgcaaccttgacctcccaggctcaagccccccaggtagctgggactacaagcacacgtcactaggctcagctaatttttgtatttttttgtagagatgggatttcaccatgttgcccaggctagtcttgagctcctgagctcaaattctgttctttagaaggcttctatattgtgaactgttacttctgtattgaaaaaaggattccgtggtcaaataagattgggcacctttgagataaacgagcttaactagatttctttatgcaagacttctcagagtatttgaaatggtaatatccatatttaactacctttttttacaggcaatttattgacctcttccagaagtgtgggagggaatagaatttgggaaacacatattgtccaatagcattctttaatcctgggggactccatggtagagcaactcagaacaccctgtagtggccaaattcagagcatactgcaaagagttctgcagaaagccagtcaaatgtcataaatcatggacaaatggcacctagaatgccaccatgtagccatagcgtgagtagtgaaatgtaattagcaggccaagtggaaactgaatttgttatctgacatgaactgtaaggaaacaatggtaaacagaccctaaatggaagttcagattaacattctggagagtgtgagagccccagtggtaaaatttcatgtacactcactgtgtcctgttcctagtggctggcaagctaaattatttctgatctaatatttttaaccaattagaattttattcattaatttaatcatttattaaattaacattaaataagcctttacaaagagctaggttctctgctagactatagcagaaaactataaagactaaaaaggaaaacaagacagatttcctactcataaggagctctggactgcttgagtttcaacatgtaaatatatataattacaacataagatataattttaatacaaccctctaaaaaacataagttaaacttacaaatctagcaccgaagggtttggaagccttcagagaacagctgatatttgagcttgaaggatgaatagaattttccacaaagtaaaggagaaacctcataaaagacccaaattcaaatatccagaccccacactgaaccacatgaaagcttactccttataaaggagtaaaaagagaatccaacatttatggataaatataaacaaaaattgaaaacaaaataattttccataaaagatttttaaagttgtaaagatttcagaaaaaaaatttccaatataaaatcttcattttctcttttgttcttgatcataagatccagtatgcaagttagagtagatcagagaagccccatgctggccacttcaaatttggagacttcaaatttgaccagagaaaatgagaaacacatagttattccaaaatgttcccaatatttcagtttacaatagtgcccagagcatacaggaaattgcaagtactcaagtctatttttctttctgataattttagattggcatattctaagtaggattagagtaaagcttttacttgctgtgcagctctttttttcctaccatatgtaccaatatgacaatttaaccctacaataattttgtatgttaagcttttatatattacaccttcacatatttacatttagagtgcctgactacctatgtttccaaagacttaaaatgagtaatctatacttaacaaaaatagaaatttttagaaagttttgaatgtaatacaaatatatttgttttctgtattaagtgctgtagagatttgagtggtttatcttgttagatttgtttttattacaggaattttactatgggggttttactttttacaaggaaaattttaaattaaacattataagaaaaatgtgattttgccctaaaaaaacactgacaaatatataaaccttgtaatattcatggttcaataggtaattgttcaatgaatgaactgatggtaccatagaggagattggaggaggagacaaaaaatacaaccatggctctcatttgaatctataattcttcctgaattcaatattaaaactctcttgcctgtagaccagactgaagacaagatttgggggtgtcaacgggagtcctgggatacattttttcttataaagtctggattaaactttttagcatggataatataacagtttgatttattcatttattcattcaacaattttcaaaaacatttattgagcattcacagtagtaacaatagcagcagtgatagtaatgataataataattataataataatacgtattgccaatttagaatttactttgtgctgagctcgatgctatgggttttgtactgattatctcactgaatctttacaacacccctaaatcagtctcattgtgcagatgagaaaagtgaggcacagaaggtcacgtaacttgcccacattcacccaacgaataaatgaattctaagttgaatccaagtcagtctgaccacagaatttcacatcctttgctactccgggatcccatggtaggcaccgtgggtgccccaaaattaaaaaatgatgtggatcatcttcccgtaaggattactatgtcataagctcaaagactgtaacagcaggttatctaggttctctactaacagacaagaaatcaaggccaatgagtgtggtgatttacccaaggtcacacagcacctctatggctaagacacatttagaatgccccaccctgtgttgactttcattccaattctcttttcactcactacacagagctgaaaacccccacttactgagtaaactacaagatccacgtaacactttattattatcaaagaaatatgaaaccatatggaaatgattttgaaatatgcccatttatctccttagacataatcctttttgataactttcaaactgacttaaattgttgaggctacatatggatcttggtctcataaaaaataagcactaaaatttagttgagttgaggttgagtttagagttagtgctggtcatgccaccctaagcttccaagtatcattcagtcccatcttgtttcctgctttggggttatttaacaggtcattcgtgagttattacataactggaacaaaagcaagatagaatcaaaaggatacttagagctggagtgacatcagaaactgatgcaacctccttattgtcaggacgggaaaaggcaagtctgggaagcaatataacacaatggaatccagcaaaagaatggggcagactgggcagaggtcacagctgtgatcctttgtactgtagtatggcaccgagtagactattttaaaactttgaacctcagaatcctcatctgcagaatgaagaaaatcatagcttctctatttgtcttaaagattacacataggccgggcgcggtggctcacgcctgtaatcccagcactttgggaggccgaggcgggcggatcacgaggtcaggagatcgagaccatcctggctaacacggtgaaaccccgtctctactaaaaatacaaaaaattagccgggcgtggtagcgggcgcctgtagtcccagctactcgggaggctgaggcaggagaatggcgtgaacccgggaggcggagcttgcagtgagccgagatcgcgccactgcactccagcctgggcgacagagcgagactccgtctcaaaaaaaaaaaaaaaaaaaaaaagattacacataataaaatatactccacagtacctggcatatagtatgcattcactaagcatagatacaatttagtcctagttctgctcccttaatttatgcattgattttctcatctatacagtggatatttttcttcttgtctgtgttacaaagtagttttgtgaacacagtgaggtaatgtccagatttttatgctttgagcttcagctcaaattctacctcaaagctttcagcacctgccagagtgggaattaatgattccctcttccatgttctctagctcatgtctgtatcctgatccagctgatatcttgctttctcctatatttgattttgtttatgtccattgcatacattcctcgagctgaggggtatttgctttctctccctgacagcccaaataaccttacacagagtggatgatcagaaaatgtgtgggctttgccctgaatgcattttgaacaactccattgctacgcatataaaaagtattcgggaattacaattatagagttgaactgagttcttaagaagcagtgaggatttcggttttggttcccccgaccccctccccactggggagggaaatgggacgagtacaaaaagaaaagcaaacctctaatcttagcatgaagacatctgctgtttacattggtcatttgtctcagaggtcaaaatacagttctatcatcgtccttatggcaatcgtgatgacaacctaacagccaggaagtagcctctcattttactcttggtagctctgaggaacaacaaaagcttgtggtgcatgttcaaaccctgagcccccgtgggacatctgtagttaaagagtccttcctattagctctttggatagtgggcggtagtccctgagaccagatgaaggactgttgtgctcttgggcccttctgtgcctcagtttttctctctgagtgatgggaataatcatcttgttctccatgactctaacttgaaacattgcaactactaggaaaaaaatgagcaatgaatgtcaaagctgactgaggtggtactggaggactacactccgaagcagagccaagtgtgataaatataacaatacctaatatttattaagggcttgttccatgtaagaaactctcctaagcacactatgtatattcattcaattcttaaaagaactctatgagaaagtcctggttttacagaggaggaaactgaggtacagaaaagttaagtgaaaagccacacaactagtaagcgtcagaccttggattggtaccccatagtcagatgccacaggccactcttaattatgttgctgtatggtcctcctatatgcatctctttaattttgtgcctagcgcaatgttttccatgtaatatgtgctcaatatatatttgttggattgaagtgactctaatacaacttgagcatggttgataaatctctcccttcttcccttccttccagctgcacctccagttcctctattaagatacttaccttttaatggtgtttcttcaattgggagctacagacacttagagatcctcaatttaatctttaaaatttttataataaaagataaacacattctggatcattgggatgaccatctcatgccaagtactgcctcttgattgcagcacctgtgtgtactagtctttggcagcaagagttaccacttcacttgctatgctaataagagagaaacagcacaaatacctaaataatgtattagagtcaagagaaacccattgcaatgacatatggtgtgggcaaaggagatatggtagatggaacgaaggaaagaggtgagagaattgagtctgcattgggcacctcacacatcatgagagtggcagagccacagggaagtcaaaggtactgacgcctcagctgtcagtaccatgcaatgctgatagtagtccaggaaacgttactaatttcaattttattattctggaagaaaatttttataaatctgttttggttttatttgcgagttgttcaaaagctgtaacataagtttatatctggttttgtgtctgtgtgtgttttgagacagggtcttggtctgtcacccaggttggagtgcagtggtgatcatagctcattgcaacctccacctcctgggctcaagccatcctcccacctcagcctcccaaatagctgagaccacaggcgtgtgccaccacaactggctaggttttttgtattttttatagagatggggttttgccatgttgcccaggctggtctcaaactcctaagttcaagcaatctgcccactttggtcttccaaagtgctacgattacaggcgtgagccactgagcctggcctatgtctctatatattaatgtgacattttaaaagaaaacaattgaagctaagctaagaaaaatttgcccttaaaatggtggaaaatatcagtttcctttctatttaagaaataccaggccgggagcagtgactcacgcgtgtaatacttgctgagaagggaggatacttgagcccaggaggtctacgctgcagtgagctatgatcctgctactgcactccagaatgagctacagagggagtacttgtcttgaaaataaaataaaagaaaagaccacacaataatgtgttcagggctttctcatgtaaaagtaattgcaaacaccaacgtattaggcatatcagtaacaccttggtgtgaaatagcactttagaccttccctttctgagagtagactttgataggagaaaggaaagctaagtagcttgatagaaagcatggctcagtgcaaaatcttgtcctaccattcagtagctgtgtgattttgggcaagtcataaaacctctccaaacctcctgttccttataaaaattagtgtaatctctgcaccttcttcaccacaatggcctatatgtaaagctcttgaccgaaaacgctcaatacacagtaatctatactaaataggaaggctctaacactaggaccttaaatggcaaggtctccagcctggttaggagaggactccccgcacacccccctaccctggcccccaaccaccaccaccaagataacgaccgcttggagtgattcagggaagtaggcccactggacaaggaggtggctccaccagctggtgccccgatgaagaactgaggccagtgggctccccagccaccgccgctcagaagctgccaagcacccccggtgctttgggccccacgcacagcactgagtgctgtaaggaaatgcaaagcattggtggccctgccatgggaatacaggtttctgttctttggaggcaccggagaaactaggagttcggtcagcaccttaaggcgctaaaagtgtacgtgggggtggggcgcacacaggttctgaaccaattcttcaaatttgcccagggctccccatacaccaggtgtggcccgcgtccctagttctaggctgttgggggaggggtcgccttttgtaggggacctggtctttttgcgagctggcagcgtgctcccagcagcgaaggccgtagtctcgctcaggaggccgcgcgccagacccggggatgcgcggtgttcaaagggtgacggcgcgcgggtcccgggcaggagagcccgccagagccggtgctgcctggcgccgagaggcccggactggcgactgctgccgcgccaccggggcccacctgcgcagggacgctcggcctcaggccctctgggctgctccaccctgctccggccgcaggcgagcggcgaggggaggggggcacggtttatgtgcagtggggcgggcggcgtccgcgcggcttccccgaggccggaggcggggcgggcgggcctcgggtggcgcggggggcggacccgccagctgcctgcgctgctcgccagcttgctcgcactcggctgtgcggcggggcaggcatgggagccgcgcgctctctcccggcgcccacacctgtctgagcggcgcagcgagccgcggcccgggcgggctgctcggcgcgggtgagtgcgggcaccgactggggcatccgcccgggcgcgggagaggcgaggcgccgggaggagcgggacaaagggccgggtatgcgcggggtagggtaactgcgggctgccggaggcaccgcaggacttcgccagggcagtcctcggggttccaggacacgggctgggggcctgaaggagctctggggagacggcgggggctgcaggtcatttggattcatgcagtgtcacccatgaaacggatggggaaagaagatcctgctgtcttgggtgcaggatgttggttgggaagcagagagagccggctctcggcaagctgtccttcggcgggggcgatggctacacccccatgcacccccccaacacaccaccaccactacttcttttccttgagttttgcatataccggattccatcaagttctgaatattaagttttaaccctgggcatgtgattgtgaacacacctaagcaagcaagagaagtgcaaaagtgcagcaaatacaggctgggaaatagaatcttttctccggagtggttgtccgtgtgcgttccgggggtgctaaccctagacactacagtctgaactaacaacagttgttgtaagcaaatagttcttctgcctgtaggcattcatcacgagttaacttttaaataaaagttttaaagttttaaaaggagcgggagaagacttgttcagatgaaggaacaccaccactcctctccagaatacaaattaggtttgctttccagcacctcaggagaaagcagctgataaaaatcctgtttgttttactgcccactgggtgacaccagtaagaattaagcagctcagtgtaggtattggaatagggcttgcttctctcagctcctgaaactaaatttgagggctccctgtgcactccttaggaacaggtaggccagtgccagaatcctcatcacatggtcatgtgagaaagaattgaatttatagatgaggtcagctgtggtcaaaagccctatgtcaaagtagtatcaggatatttattgcatgttgtttcaagatcctacttgtgcatgcgagtatttgtgacaggtttataaccgtgcctaccatgaagtctgtcaggagtggattggaggtgaagtggggagaaggaacttagaaaatgcccccagaagccactatgtttatttgtgaaagtgtttgcaccccatctgcgtacgaaaaggttgtttcacttgcagttttcctagttaaataaagtcaagcggtaacttgtcctttcctgtgcctgaactgggaaggaagcctttttccaaggtgcctaatatggatctcatttttgtaacactgacgacttattcagctggatggttaacatggatgcattttctggttgtagcataagtgtccattaatgcatctgagaacatttttgtccccagtctgcaatggttaatagtctcaggttctcccagtaactcttctcatagatcccttaggatttcatccaccaggcattattcatgcctaactcccacagactccagggaatttgtttctcatgttctcaatattagcaggtttttttgcactctgttcttgttctgccaggtttgtcccaggctcaatttagtttacctgaaatccgatagagaagaggctaaacttcatttgaccacaagattgtgtttagggttgcttggacttgtaagtgccttgtagtttcctgtacaagactgtaattcttaaacgattatgtgattaggtctgttttgccttaatagggtctgtgattcaggaaaacgagaacaagcccgactgcagagtattcacagagcttggttcattcttaagcatttgctttaggatttagcatgatttcaccgttccatatcactgaccactgattccatggaagaccctttgtcatctctccaaatggtgtccaaaacctgtatctttgcaaactttcctgccgtttctttctgtcattactgtttatagcggctgcaggaattcacaatttgtacaatagagaatacatgacctaaggattaggttttccctcccagcacttgtttgctataggagttaaatcattctctcaaacagtggccctcttgaggagacctgtgttgttgcagttttcaagactaaggtgccgtgcaggagacagtagtcactgcatccagtctccaaagagattgttgtttgcatatctgttaattatgcaaagtcccaccaccaagggcctatgaagtggcagcatcctcaaaaagtataaatattttcagacagtggctcatattgagtgatggagggtggactgtgtaacctatttatgaatcagatacccaaagctggaaaaggaatagtttctgtattactaagcatggtgaaaaaatattttcttaccttcattttccattcttccctgccagttaggtgaaatgatgcacggaaacacttggttggaaaccttaaaagataatttatgtataccaggaatctttattcagcaaaagtttattcctagaaatgaaacgttatagacctaaattttcttcatccagacttaggtaaaagggtgagatttgaaaatcttcattccatttttaaggtgtgagtcttccaggcagctctgcaaggataaggtgattcatttataagggtgagagagaatttaaaatcatgtaactcattagttacctttccaggtgtgggattatgaatgttttcattacatctgtttataccttagatgagtgtttatgtttaagtaaacttaaacaggtatagcacaggcttacccagggtttatacagatggtaacaataattatttgtcttctaaggaattactccattatcatgtgagttgagaaatgaatgtaaatccaccaacctaattttaaagcatcacagttttgcatcatttgttgttttattaatgcggatgagtcagggcaggctgcgaatgcctcaggaaagacccttaatggacaggagggttgtttccccctcaggcttttctttggggcctgtcttaagagcatacacacacagccatccctccactcagttcttgaaagctgccttctgctggagtcacaatttgtacaatagagaatatatgacctaaggattaggttttccctcccagcacttgtttgctataggagttaaatcattctctcaaacagtggtcctgttgcagactgatcagggaaatcttgtctgccagatagatgagaaattagcatgattcattttccttttccttttcctttccccctcctttgcctccaccctccataattccatgaatcaatggtcctgagaagtaaatgatagtacagacactatagtcagcatcgtccctgacctggacttacgtgattctggaaaattataatattagggaatcctggacctaaagaccagagctaaaaagaccagctaaagcaatcatctggttgaggatgctattcagaagaatttctaaagcaccctaaataaacatttggtaaaggactaagcaacttaagaagcttgtagctttaatacagacatcagtttaaacccatttaagggcttgagaacccacagctgtatcttctaatttctgattagatattttaaaaatatctaagcctaatcagtttgaagtaatttgatgggcattagtttctaaaagtctgcattcatttctaaatctgaattaaacttttttaaatgcaattttataacttttagcgttacatggaagctttaagcaagatatataatgctgtcagaacaaagtcttatcacacaagttagtaaatagggtttagtaatgtggagaacttggaagcagagttgcaaactaatagaaattaggacttattaagtctctgaaaaatttattcttcaaagttaaagcttcacactgtcctgttgggttagcagtttgtttttttcttatagatggctggcttctccttcactcctggctaaatgaacagaattcaagttgtaagaactctgaattagtaatattctatcatgcagtagactctttagcattctctaacaggattctgtgattcataactgatcccaaagtttcttgagacataatcattcatcattttgccaaagaatacatttgatcctctatattgagaggttggagtaaggctgtggctcatgaaagaggatattgtaactgccatgttcttcatgcacattgaaaatattatctgtagctgatgataatacatactataatactacctcatctcctactctttctcccccaagaatcgtattttaaaaacaagaacgcttggcaggttggacctccgcattctgtgttttctttcttaagataagctgaagtaaaacttggcttaccatgtgctcaatgtaagtcacattaacattccccacattactcaaagggaggagagaatggtgcgttgaagcccaagatacagccatgtgggagatatatgactcctcctagtccctgtcacatttggcagggattctggtgtgagtggggcatttagtcacctagacagcaacttatatagagaaaaggctgctcaagtcctcgataagcccaagggatgactccttagccagtaggtgggaataatcagaaccatgccccacagatctcctaaagggttgtcatcaccacacccatttcactgccaagttctccattggagaggaggactcagctagcattggcatccccttcctagtccacttaaaacctttagtcttggcaatattcccaacaagcacatacaaacacgtgtgtgcacatatgcgggcaccccatgttttcaaggatttaaagaaataattaaatgtatttccttcctacaaaagggctcagggacccttcctatttggaaagatggagacaagtagaatttcaaggaattagggagtcccaaggaactggcttttccaggaccttatttctttcttttcctatccctattctccctgactgaagtggaagccaagagaaaaagtcaagcaaaaaggtcccagaggtgggtggggcacacacatatgttagaaacacagtgtggatattgggaatgagaatgggcatgctcagctatactacatcagatcattgggattttctacttttatataaaagggagcaaaaggcacccaaagttgccagtagatctgtactttcaaacaggaagagaatgagaataacaaaacagtttcttcctaacttctgctgtgttcccagagcctcttgagacccaccccttccgggtccttgtttttggatgcttggttgtgaatgagttaccctacctgctgagtcagcttctattgaaccagaagagtcagagccactgagagccaactgatgcttaaacatttatgaaagcactttcagtattcctcgttgttgtttttcttgtgggatgattgatctgggcatttaaacataccttgcagtataaaatccaaacttctttgtttagtacacatagcacttcacaatctagctcttgcctgctgcctccaccacttcctctactccacccttgctgagctaagtgtgattccccaaattactcacatggttgcatgttgctgtgcccttgcacagactcttgtttcccttccctaagtatccccttctctctgtcttatgttatcagacttcttttctacttcagcacccatctgaaacatcaggtgatgcctggaaaatttctaggcaatttgttcatttagagggtaaatttaaattacatagcttactgaatgaccgaagcatcaaggagggacagctccacggtgtcacctttactaggactcctattgcttctaaatggtgggtacatttgaaaagaacgggtgcatttgccaaataatacatttggtcctctatattgagaggttggagcgaggctgtggcatactatttctcaagcatcacttctcctagaaggcctctcttgttcttactcccacaattggcctcaagctgtttctctgagctaccgcatcatccatgtacatcattgtcattagcgtcagcatgcaacattcattcacttttccattaatacaagcatccatttaacaaatctttgtcgagtgctagcacaggcccaaatttaagagatttagttggtaatacagatataaacaactgaaaaagtaaccaatggtaacagttcatagtgttatagctgatgcaatattagagctttagatattgacaaagatcctggtagtgtacaacataatccaaaggaagaaggaatattttattagaagcctagccactctggaactcaatatatataatagtaaaggttgttgtaaattcaaagcaaaaaacaaaacaaaacaaaaaatctcataccctttctcgagtgcaccatcatttaaaaaccacaggagtggtggtaattgtgacactgtggagctgtccttctttgatgtctcagtcactcagtaagccatgtaatttaaattgaccctctgagtgaccaagttgctctgaaaattttccaagtacatgttacaatgagaatgagagaaggaggagggaaaggcggggacatcatgaaggtagaagaggaggaggtttagaatcaagcacaaagagggctcaaaattacgtggaaattggggctggtcagtcagttagccaggggactaatgactttatgcctgctactctgcagtctaccatcattagggacatcttaaacatagaaaggaaggaacacccaatttcacttcaggcacccagccacaggaactttcctaaggttgagcctttgcgttgaaagtgagaccgttatctaaggattcctctccacaccctgattcctgaggagtgttcaaagactcagaaacaatgacaggcctgctgctgagctttgctgtctgcagtaaatgaacgttcagcccttgccctcctgacctgcttgtctttgtttctacagaacagtgctcggcatggcagggattccagggctcctcttccttctcttctttctgctctgtgctgttgggcaagtgagcccttacagtgccccctggaaacccacttggcctgcataccgcctccctgtcgtcttgccccagtctaccctcaatttagccaagccagactttggagccgaagccaaattagaagtatcttcttcatgtggaccccagtgtcataagggaactccactgcccacttacgaagaggccaagcaatatctgtcttatgaaacgctctatgccaatggcagccgcacagagacgcaggtgggcatctacatcctcagcagtagtggagatggggcccaacaccgagactcagggtcttcaggaaagtctcgaaggaagcggcagatttatggctatgacagcaggttcagcatttttgggaaggacttcctgctcaactaccctttctcaacatcagtgaagttatccacgggctgcaccggcaccctggtggcagagaagcatgtcctcacagctgcccactgcatacacgatggaaaaacctatgtgaaaggaacccagaagcttcgagtgggcttcctaaagcccaagtttaaagatggtggtcgaggggccaacgactccacttcagccatgcccgagcagatgaaatttcagtggatccgggtgaaacgcacccatgtgcccaagggttggatcaagggcaatgccaatgacatcggcatggattatgattatgccctcctggaactcaaaaagccccacaagagaaaatttatgaagattggggtgagccctcctgctaagcagctgccagggggcagaattcacttctctggttatgacaatgaccgaccaggcaatttggtgtatcgcttctgtgacgtcaaagacgagacctatgacttgctctaccagcaatgcgatgcccagccaggggccagcgggtctggggtctatgtgaggatgtggaagagacagcagcagaagtgggagcgaaaaattattggcattttttcagggcaccagtgggtggacatgaatggttccccacaggatttcaacgtggctgtcagaatcactcctctcaaatatgcccagatttgctattggattaaaggaaactacctggattgtagggaggggtgacacagtgttccctcctggcagcaattaagggtcttcatgttcttattttaggagaggccaaattgttttttgtcattggcgtgcacacgtgtgtgtgtgtgtgtgtgtgtgtgtaaggtgtcttataatcttttacctatttcttacaattgcaagatgactggctttactatttgaaaactggtttgtgtatcatatcatatatcatttaagcagtttgaaggcatacttttgcatagaaataaaaaaaatactgatttggggcaatgaggaatatttgacaattaagttaatcttcacgtttttgcaaactttgatttttatttcatctgaacttgtttcaaagatttatattaaatatttggcatacaagagatatgaattcttatatgtgtgcatgtgtgttttcttctgagattcatcttggtggtgggtttttttgtttttttaattcagtgcctgatctttaatgcttccataaggcagtgttcccatttaggaactttgacagcatttgttaggcagaatattttggatttggaggcatttgcatggtagtctttgaacagtaaaatgatgtgttgactatactgatacacatattaaactataccttatagtaaaccagtatcccaagctgcttttagttccaaaaatagtttcttttccaaaggttgttgctctactttgtaggaagtctttgcatatggccctcccaactttaaagtcataccagagtggccaagagtgtttatcccaacccttccatttaacaggatttcactcacatttctggaactagctatttttcagaagacaataatcagggcttaattagaacaggctgtatttcctcccagcaaacagttgtggccacactaaaaacaatcatagcattttacccctggattatagcacatctcatgttttatcatttggatggagtaatttaaaatgaattaaattccagagaacaatggaagcattgcctggcagatgtcacaacagaataaccacttgtttggagcctggcacagtcctccagcctgatcaaaaattattctgcatagttttcagtgtgctttctgggagctatgtacttcttcaatttggaaacttttctctctcatttatagtgaaaatacttggaagttactttaagaaaaccagtgtggcctttttccctctagctttaaaagggccgcttttgctggaatgctctaggttatagataaacaattaggtataatagcaaaaatgaaaattggaagaatgcaaaatggatcagaatcatgccttccaataaaggcctttacacatgttttatcaatatgattatcaaatcacagcatatacagaaaagacttggacttattgtatgtttttattttatggctctcggcctaagcacttctttctaaatgtatcggagaaaaaatcaaatggactacaagcacgtgtttgctgtgcttgcaccccaggtaaacctgcattgtagcaatttgtaaggatattcagatggagcactgtcacttagacattctctgggggattttctgcttgtctttcttgagctttttggaaggataattctgataaggcactcaagaaacgtacaaccacagtgctttcttcaaatcatatgagaaatactatgcatagcaaggagatgcagagccgccaggaaaattctgagttccagcacaattttctttggaatctaacaggaatctagcctgaggaagaagggaggtctccatttctatgtctggtatttgggggttttgtttgtttttgctttagcttggtgaaaaaaagttcactgaacaccaagaccagaatggatttttttaaaaaaatagatgttccttttgtgaagcaccttgattccttgattttgattttttgcaaagttagacaatggcacaaagtcaaaatgaaatcaatgtttagttcacaagtagatgtaatttactaaagaatgatacacccatatgctatatacagcttaactcacagaactgtaaaagaaaattataaaataattcaacatgtccatctttttagtgataataaaagaaagcatggtattaaactatcatagaagtagacagaaaaagaaaaaaggactcatggcattattaatataattagtgctttacatgtgttagttatacatattagaagcatatttgcctagtaaggctagtagaaccacatttcccaaagtgtgctccttaaacactcatgccttatgattttctaccaaaagtaaaaagggttgtattaagtcagaggaagatgcctctccattttccctctctttatcagaggttcacatgcctgtctgcacattaaaagctctgggaagacctgttgtaaagggacaagttgaggttgtaaaatctgcatttaaataaacatctttgatcacaaaacccttgttttctcatataatgcctataagcaatctggtgttctactaaatacattctggggatctctgtaacagccttttggttgaggtggtaatgtagaaagaatgatgagtccgagtggggtcaggtgtctgtgcctttagggtttaaccagaccctataaccaggatttggaaatcttcacagcgtgaaattagaagtaataaatttgaaaattatctgtcgctgagaatcagaagtttgtggcagaactggggacacatgttttacatagactttactccaaattttgaattttgaaaaggagatagtgtttttaaaaggtgggaaaatagccttaaaggggtaaagaaataggagcagagttgtatgtgtaatctttctttttactgtttttggaccaaaaagggattgaaataccaaggtcatgctcccaattccctgttctttgtgtagctcagtctacctgcttggggagatgggaagtacctggtgatgcctggatcatgtattcaaggaatcactctttctctaacaaaccccacaggaggtctttaatgcagaacttgttaagaatgactaagcctgccctggaatgatgactctaggctgctgtctgctaactgaagggtaaatggcagccatccagtgagtccagaggaattctgacagtgatccccaacactcactgagggcttccttcttactttgcctgggttctgctgctgttcatgtctgcactttttctttgttcttgtcatgaaccagctcaggtatgccttgaagttgcctctgaccattgatttctatggatgtttgataaggcagccatttcatttatcattcagaatgggattcttttgagaatgctatgactaatgaagctggggcagcaggtgtaagccaggtatgtcttggccaacaagcatgtttggtcacttaattattaacctttcaaagctctgtatagcgtgcagactggcagccatccttgctaatctaggaacaaaggtggggctgcagctccctgcgtttctcctctctgggcttccattgtgattcctgtgataccttctttgcctggctcagcattctgagggcctccaataggggaagggcatttaaaaatccttttgatggggtggggtcatcgtacatacatggcagacatgaggccatttctgggcgatcaacaacacatctgtttttagtctggggttccccccggaggaggaaataaaccagcttccagaacaagagtaaacaggggttggccgggcatggtggctcatgtctgtaatcctagcactttgggaggctgaggcaggtggatcacttgaggtgaggagctccagaccagccctgctaacatgctgaaaccccgtcactactaaaaatacaaaaattggccgggcatggtggcgcatgcctgtaatcccagctgctagggaagctaaggcaggagaatcgcttgaaactaggagtcggagattgcaatgagccaaaattatgccactgcactccagcctaggcaacagagtgagactctgtctcaaaaaaaaaaaaaaaaagaaaaagaaaaagaaaaaagaaagggtaaacaggattgagagctgagatagcagcctggtatgggaagatgatggccttggagttgggcagactgattccacagttgtctagttccttatggcaaataaatcccaatgcattgtggtttaaaatttaaaccctcctatatgatttaaagatcctccctcttctgggttccagcttctcagtgggctcatttgaagctgaggaagagagaaaggagacaggcatatttatctgactcattgcagtgatgttctctcttcattgcttgctgcttctcagataacaccagctcttctaccctccttagcccttaactatggtgatataaccctctgtctcctgcgcacctttatctaacagatagctgtctcaagtacacagccagcaagatgcttcaagcccagtcatcttgtttcctatttgcataacccacaagaaactcataggcttgctatacctgtgtgttagtggcttattgagaatttgggagggaatatgtttgagcctcaacaaactgaagtgcaagggcccctggcagtatcaaatttgttctgtttaagagacagatggggaagagttcaaaaagatagattccagccagctcatatagaaattaaggattctgtcaaggtctttttaattcatcttacttgctgggggatacagtcaaaggactttaagtaggagccctggtggggcctaatcaggaccgacttatccatgaagggacagtaggcacagtgtctagggcccacagcagtttcagagatcacacagaaatatttattttaaaatcagaagaagaaagttaatttttaagcctaataaaatgtgttaatataatgttaatatatttatattaacagccataaaatataatttttaatattttttaatggagaaggagacttatgaaggcaaaagtgcttagggcccacaaaaatcaaaatgcagccctgaaactcattcatatttgacaatatctctttggatgctaaatggagaatggattttaggcagtggcaatgggaaaactagtaatccaggtaagaaatggcagtgactttgactttggaagtagaggatattgaatagtggtcatatctggaagagtatatatttgaaagtagagccaacatgaataggtgtggtaaaggaggaatcaagaatgactgcttggcttggggcctgagcatccacagagattccaggtgccatttgctgagatgggaaagactaaaggaagagaattagattctgctgtggaaatgaaaaccgagaattcctgtgtcagtcatgttaggtttcaactgtctagcggacacccaaatgccaatgtcaaatgaactataggatctctgattgtgaagctcagtagaaatatctcaaatgcacttgtagatgatatttaaaccacagagaaataatatcatctggggagagaatgaggcttgagaagagaagagggctgaggacagagtcccagtccaccaacatttagatgttgggttcagtagaagagaaggaggaagaggaggaggaggaggaggcagtaaggaagctggtaagaagccaccaataaggttaaggacaacaaggaaaatgtggcctcaaagaaagcaagagaaaaaagttggaagccaggttgaggaagtgagagacaaagggtgggacaagatcagattgtgcttcaggttatgtttagaaatgtccctctggctatggtgggaaagacggggtggaaggcaggagaccagagaggagtctgtctagtcctccaagcctcagctgttttcatgacaagcagaaccttgccttgtgtgtctctgtgcacccaccatgcaagcatggggcactgtgcaccaggtatgcttatcatgcctgtgaatgagggattgattaactgaatcctccagggacacttgggacagctctgcccacaagaagagcaagaacccaggcatcaatggggtggtgcagacatgggctcagggaggccctctgccatcccctcctgcctggaccaatgttttctgagaggcagaaagtgcagggtgactcttcactgtggtatttgtctatgtgtgtatcaagtgtgtaaaaatactgtgctctcttagtcttgatttatcactgccccttgtcttcgggctattaaaaggactaaggccctgtcttccataaagagcaagaacagctttgagaagcgtcaagttccaatccagtgaagaaagactgaagtgtttgccttggagagaatgaggagagtctcaggaaatgaaataaacagaacaaggggctagaatccaagcagcagccgtgggaacagcagccagttcttgccatccaatgagatgtcttctcaggatggccttccctggccatcttctctgaaattcaatgcccctcagccccttcctcggggagttcttattgcccttccctgttttattgtcctgctctgcacttatcactaacactgttatatttatgtatttgtcctctgccactagaatgtaatttcatgaggacagaggtttttatctgttgtgtccccacaattagaacagtgcctggcatgtaggttctcaataaataatgttattcaaatggctgattgaacgaatgatcccagatggtttatataacccagaacatgatgacttagggttatgtgagcttggatatttcttgggtccaaacacatcccagaataaaactcttgtggtgttttgtatgtattctgttctattctagcatgtgttacattgctgttgttatttatgtgtctgcctcttctacaagactatgagccttgcaagagcaggggctgagttctgttcttctgtgtcttcccttatctatcccatggtctagcacaggaaatatttgtgagaaagtgagtgtctgtctgtctgtcatgacttagcctgtcatgacatagatcctctcccacatctcacaggcaacaagctagagttctgtgctatccatcacctcctctccagctcccctgccactgccctgatttcaccttgttgtttctcctttaactatgacagcagattccaaactggattctgagcctcccagctcgcccacacctgcccaagacatgttctgaagcaaagacctgatcaggcccctcccctatgtttcctattgactagatgctggttactagagaagtttagttttcttagccatgaatccatgaccaatccaatatagtgatcagatttatcccccattgcttcccagagtcacataacctgtcgtctagccaagttgtaccaaacacatccgtgttttcaaccttctgtcattgctcaagctctcctaccctccagctaggttgcccttcctccatctcttcaattagtcaatcattcagttattcattcagcaaatgtcctcaagcccacctcggtgccagtcactgtgttcacgctggggctgcagagatgactgagatacatccctgtgctcagggtgttcatgcgtcttctccttttgaggtcactgtagtcatgactcttgctctacctcccagagtgatgaggctcagtaactaccctctccacaaaatatcttggcctcagtacaatggaattgccactttgtaaattgaatgagttgagtgcttcccctacattttaataagtctttgagttaccgtcctgcctgattattacatttcctttcttggatttattaaaacttgctccacccccagttccctgatggaaaatgccatgtttggtaaactaacatagcccccagcatgactaatatcctctgtggataaggcattctgggacataaggacactgtttttttaaagtgacaggttttactactccaggatgatttccagaccagctgaacacagcgttggaatagaaatgccaccactttgtctttctactttcacagaaaagatgtgttggttgagtataacataatatcaggaagaattcattcaattccttcattatatctttaccgatcagcctctttatgctttgttttgttcttcaagctgtttagtgtcccaaattctcttcactttgtctgaggtcttgaaaattgtaaaatcctatgaagattcatctgcagaaaaagtttaacttgaaaatctaattatttataagacccacttttgtgaaagaataaaacatgatcatgcttgagtctaaaactctggacatttatagttgcgatcagatttatttccattctatattttttcaaatggcctatttttgcttgaaaatatggtttttgaggggcaagaaagcctttttttgtgattttttttattgccttctaactgtgggcttctgtttccctcatgctttctatttcatgtatagtatattttggatcatgtttttcctgactctggaacttcctataactttttatatggtgttccttttagatactgttttaaaaactctttcttttgaaatgtgtcaatctgtccagagaattaagttaatgatgtggctatttttaaactctttagatagctatggttgaaaagacaaaaaacaaagtgagcaattctgtgactgcagatagaacttttctaaatggctggctggcatttttgagacaaaactctatacttttattgaaatacctctatttctggctcatggattgtcaccgtattctagaagtaagacaaagagccttgtctggtggacctgaacaccaattagagtttcttttcaagagtatcactattcagctctcctgtttgccactggccagttgactttttatagccagtgaaaatccatccaagaatcctgcagtttcttcatgaatttgttcttgtaatgaatttacgttgtgttcaggcaagtatcagatcattcatttatgaaaccaacaagcatgtattgagtacctgtaatgtgccagacacttttatgaatgatttacatatattaattaattcacttcccactacaaacctatgaagtaggcattgattttgtatccatgtcagagaggggctaattgaagcaaggtaacttgccaaaaacacacagctagaaatgggattcatatcttagcagtctgccttgggagttcatgctcttattctactaatagcaaggtgccataagactaccgtgagtggagcaactaaccatgcctccagattgggagtcaggagcctcagggaaggcaaattcagaacaagagttgtttgatccttgatgaagaggcttaatcgttgatttgatccttgttagcaactgattagcacataccaaattacctgcagagaagatacaccagaaaaaaatatgtgcacatatctgcaaagctgtattacatacctaaaaactttgtatcatcagtacaagtataaaacaaatcatgtgtgatttgattcatttatacatgctaaccaaatattttcagatttcctttatgctgtgccacatcatatgtatcattaattgaaatctattttgaatggccaacattcagaagtttctcgagtgcctggggtgggaatctaaatttttaagacacactattgtttcaaccattgtttttccttataacatgattctgatcaatttgtatttagtaagtgtttccgaccatttagaaagacctttcctttctaaatcaacacgtaacttgaaaaaataaatcaaaattttgaaatatcaccttgttctgtagattcagactaaacgatctcagatttcttcatgtgttggaaaatgtacttaaaaaaaatctttccccgaggcatcttctttgccaactggactgacttttgctcattcttggattgccccctagtggtttatttaacttatgactatttcccagatgctcatcggcaactcgtggtttctttgaatttgtttttagtttgatcttttccacaccttctcccatttgcagagaggggcttccaaagacagtgtctttgaatgagggtgagcaacgtgcaaagtggcacaaacgcttagtgttaatcaatacatgccattaatgatggtggtgaaatccttctttcaagtttgttctctttttttctttgtgctgtttttaactttgccaactccttactttcttccctctgttaacatcctactggagtggtgccaggtaatctggtggcacaggatgacttacaggcaatgctgtgtcttgaaaatgccaattaggaatgctgaatgctgctgggcgggagtcccatgctctcacccatataacaagtcagcactccataggcctcagtcagacccagacttcttggctccttttgggtagctaaggctatgactcgctggcctagacacttaagcatcatccaaatagcgagaaaaacctttgagtttctgtagaaagccagcgagagacccagacagcatcacagacctgacactctgcagaactctgggtccaggccatctgcaccaattagaccagaaccaagaaacgcagtgcaagatgcattattaattcaaaacttttttcaataagaaaaaagccaattattggctccatttttttttagagagagaacacctacactgctatatataatttattaacttagtttagtctctcaatatttagcaagtttgtttaaaaattaccattcccattggtttatagtgacatgaatataaacccataatttcaaagtcagcattcctttcactgtgaacataaggcttcttaagagatagtgggggttggggaacagtaatgactgtggctggtgggcactgttcaaagccaaaaagactggcaggtttggaaaggcatacactgtgtatagacactctctcagtatactactgttccccacacttttgctgtacattcttgtctcaaaatatggtataaattattcccttaaatttgaaaaaacaattaagatgaatacattttcatcttcatttcacaataactcttttaaatataaaaagttcctcatgtttgttaaatctgttcaaaagttgcatttaagtactttcttcacaacatgtacaatgttttcatccttagtgcctcattacaatcagtttggcaataagacctccagtgctttatcaaaaatggcattcaatagattataagattgataaatctgcatttgaatcagtcttaccacaatgaattataacaaagtccaaaaaatgtataactattcatcaacacccttggaacctatgaattattgcaaataatctcccacgtgcatgtaattcaaacataaactttgtggggagggggtgtaaaataaatactacagtatttcttcaattttatttaatgctgcctagctggttaaatgaaagattaattactaacaggaagagtcaaaattttaaggactgttttctaagaaggacaattttgcaaaacaaagataagcaagagcctatgcaaatacattttcttgtagtataatgtaattgctaatatgaggtataatctgtaagcaattaatacaaatataaataagtataagccaccactaactcacagtctcatgaaaagcttctcagctaaagtagtttgaggataaggttaagggaaatgaggagtggacagggcaggtttccagtgggaacatcatttatgtgccttatcattatcatcatcctgtatgtaccagtccattgttgcagaaaggtaaatcctttccaagtatgttatactttatgtagcacagtaaaattatttaagtattactaacgctttatttgcgtttgtatttagatatacacataattatatatgcatatcaaaaactataaacagaattttaaaacactttatctcatttgaggaaagttaacaggtaagacaaatctatgtactatagaatttttgaggatatctaaactcagggtgaaacaaagaaaaacatttctacctctttagtaaagggcttgtgtgaaacctcaagctctcgctcaattttttttatagatgggtatgtttgatgaggattgtgatccaatgattgtttagcagcaattttacccaactgtaaattcttttattaacaggcattataaacagatagtactaatcttattctaaaaccatgagtgccacactggtgaatatacagcttatgaataacttaaaaagtatttcccattttaaaaggcaaacccagcatacaaaaacttatactaaatgaagaagctataatatggatacatgattgatgtgtctaaaatgatatatacagtacataattaatgttaattatgtgatctgtacatttttccatgattcccttcatgcttcactttccccagaaactgaaacctgtacttcctcttctaaaattggtacaatgaggttatccctggacatcaaattatatttcatctaattcatcacaaatttagtaatccgatgacacaaaaatgtttccttttcatattcatcaaatatctaccaatgatgaaaataaacatgtgaaaatattctgtaactcctaaggtatagtgatcctagttttgctacggattacttctttatgctaaccctgctgggaaaacattgattgctcttcagaagacatgcagcaccatcaagtatgtgtctggtataggctatagcaggacactctttcagagctttatgagctgcacaaagaaaaatccattgttcagttgctgtcatttgagtgcaagtatctggatggcattcactctgaagtttgacaacaagtccgtttagctcaagacagaattcccttaaatgttcatacttccataactttcatcttggccttcagctggttcaagaattttgtcaatattggagcaatctgctcttatgttctgttgaatatactgttgaacagctagtgtactgtctatttcttcaaagtgttcgtcaggccaattataaaaatcctgtgcccagcccgttccgcctcagcacgctgccccctccgccatgaccatagtgtcagcgtctgggcctattggctcgatttaataagtaagagtaccaataattttttagaagtaaaatggatgtattaaaggattttaaagaaaaagcacttgcttttatctgaattttaaaaggagaattgacattacagatgaaataaagatgaatacagaagagaagatcctactttaaatgcaaaataatatctataaaatgggactagtaatttcttcctagagagcttgtgataactagagataatgaatataaagtgaccagtgaattatcaagcacataataggggttcatttatttattcgttcatttggcaaatatttattgagcacctactatgcaaggcatagtaggtaaaactgaaaaacgtgtctttgtgaagtttacgtggtaattttccatcccatatgccaaagagataacaggggaggaatgaccaccatcttttagagacttgtagtatcatttaggagatgaaatgttatgttttatgtggctgtagaaagcaaaactagagccaggcatggtggctcacgcctgtaataccaacactttgggaggctgaggcgggagaatggcttgagctcaggagtttgagaccagcctgggccacatagtgagacctcgtctcaacacaacatcgaaaaattagctgggtgcagtgaagtgtgcctatagtcccagctaatctggaggctgaggtgggaggatagcttgagcctgggaggtcgagactgcagtgagctgtgatcacgccactgcacttcagcctgggcgacaagagtgtgaacctgactaaaaaaaaaaaaaaaaaaaatgcagaactaggaccagtggatgatctttcaagggtggtggttttcataatgaaaggaaaaccctgtttacaaccaggactgtccaggaatgggatggggccacctctgggagcagagagacatgggctggaggtgattctgttagtggaagtattttgtagagaatttgagaccttgtatcaaggatctttgcagcgtgggcaaggagggaatacaaaatcggtgtttccttctgcctcttaattccaagatgctggaactggggtgggaagccaagccattgaccagaaccagggctacaactcgggggtgagtgtgggagtttaaatgcaggatccacactggttacagctgaactggagccacagattcctgtcactttctgcctccagggatcaagtaccatgggtctcgacctgaccagcctgaaggtttgggaggccccgtcaggggatgggggcaagttactttccctaaaagaatgaagaggctacatctggtgaccagacacaaacatggaggcagagggtaataaggatgatacatacaatttattcagttcctatttcttttactttagtattcctaatctgtaaaagcatcataaaaaaaaatgtatgattaatctcattttacagatgaagagactgacggtccgagatgtagaatagctaacctaatttagtgtaaagccaggactttgaacttgctgtctctgtgtttcatctacttcagatggctccctaatgagtagaatgagacctgtgtgccaaccctggcctagtcctcatgcccccacaactgtgaagcgagagggctcaacagtttcgaattcaattcaaccaccacctcctgaataccaactaggttccaggacctggctagaagcagagacaccaggacagaaaagacagtgttctgctttcatggagttcacagaagagtcgaggaggtaagttcatatcagattatcacaaagcagtgtgcttaatggtgcttaaatcttttcatgtttccacattttctaatgcattttaacggagcaaagcaatgtcacattggtttcatcaagaattcagagcaggccgggcgcggtggctcacgcctgtaatcccagcattttgggaggccgaggcgggcggatcacgaggtcaggagatcgagaccatcctggctaacacggtgaaaccccgtctctactaaaaatacaaaaaattagccgggcgtggtagcgggcgcctgtagtcccagctactcgggaggctgaggcaggagaatggcgtgaacccgggaggtggagcttgcagtgagccgagatcgcgccactgcagtccggcctgggcgacagagcgagactccgtctcaaaaaaaaaaaaaaaaaaaaaaaaaagaattcagagcaaggggctttggtgaagagaagtcaaagccaaaagagggctctgccgtttagaagaaggggaatcattcagcctgggcaacatagtgaaatcccgtctgtacaaaaacttcaaaaattagccgggcatggccccgtatgcctgtggttccacctacttgggaggctgaggtgggaggatcgcttgagcctgggaggtggagattgcagtgagccaagatcacaacactgcacttactccattctgggcaaaagagtgagatcctgtgtcaaaaataaaaataaaaataaaaataaaataaaataaaataaaataaaataaaataaaataaataaaataaaaaaacaaaatggaggaaagtaagaacagtggggtgaggcctttgaactctgaaattatgatggaacccagtctttttatctttttttttttaaattttattttattattagtatactttaagttttagggtacatgtgcacaatgtgcaggttagttacatatgtatacatgtgccatgctggtgtgctgcacccattaactcatcatttagcattaggtatatctcctaaagctatccctcccccctccccccaccccacaacagtccccagagtgtgatgttccccttcctgtgtccatgtgttctcattgttcaattcccacctatgagtgagaatatgcagtgtttgcttttttgttcttgggatagtttactgagaatgatgatttccaattttatccatgtccctacaaaggacatgaactcatcattttttatggctgcatagtattccatgatgtatatgtgccacattttcttaatctagtctgtcattgttggacatttggattggttccaagtctttgctattgtgaatagtgccacaataaacatacctgtgtatgtgtctttatagcagcatgatttatagtcctttgggtacatacccagtaatgggatggctgggtcaaatggtatttctagttctagatccctgaggaatcgccacactgtcttccacaatggttgaactagtttacagtcccaccaacagtgtaaaagtgttcctatttctccacatcctctccagcacctgttgtttcctgactttttaatgattgccattctaactggtgtgagatggtatctcattgtggttttgatttgcatttctctgatggccagtgatggtgagcattttttcatgtgtcttttggctgcataaatgtcttcttttgagaagtgtctgttcatgtccttggcccactttttgatggggttgtttgtttttttcttgtaaatttgtttgagttctttgtagattccggatattagccctttgtcagatgagtaggttgtgaaaattttctcccattttgtaggtttcctgttcactctgatggtagcttcttttgctgtgcagaagctctttagtttaattagatcccatttgtcaattttgtcttttgttgccactgcttttggtgttttagacatgaagtccttgcccatgcctatgtcctgaatggtaatgcctaggttttcttctagggtttttatggttttaggtctaacgtttaagtctttaatccatcttgaattgatttttgtataaggtgtaaggaagggatccagtttcagctttctacatatgactagccagttttcccagcaccatttattaaatagggaatcctttccccattgcttgtttttgtcaggtttgtcaaagatcagatagttgtagatatgcggcgttatttctgagggctctgttctgttccattgatctatatctctgttttggtaccagtaccatgctgttttggttactgtagccttgtagtatagtttgaagtcaggtagggtgatgcctccagctttgttcttttggcttaggattgacttggcaatgcgggatctttttggttccatatgaactttaaagtagttttttccaattctgtgaagaaagtcattggtagcttgatggggatggcattgaatctataaattaccttgggccgtatggccattttcacgatattgattcttcctacccatgagcatggaatgttcttccatttgtttgtatcctcttttatttccttgagcagtggtttgtagttctccttgaagaggtccttcacgtcccttgtaagttggattcctaggtattttattctctttgaagcaattgtgaatgggagttcactcatgagttcactcatgatttggctctctgtttgtctgttatttgtgtataagaatgcttgtgatttttgtacattgattttgtatcctgagactttgctgaagttgcttatcagcttaaggagattttgcgctgagacgatggggttttctagatatacaatcatgtcatctgcaaacagggacaatttgacttcttcttttcctaattgaataccctttatttccttctcctgcctaattgccctggccagaacttccaacactatgttgaataggagtggtgagagagggcatccctgtcttgtgccagttttcaaagggaatgcttccaatttctgcccattcagtatgatattggctgtgggtttgtcatagatagctcttattattttgagatacgtcccatcaatacctaatttattgagagtttttagcatgaagcattgttgaattttgtcaaaggccttttctgcatctattgagataatcatgtgatttttgtctttggttctgtttatatgctggattacatttattgatttgcgtatactgaacgagccttgcatcccagggatgaagcccacttgatcatggtggataagctttttgatgtgctgctggatttggtttgccagtattttattgaggatttttgcatcgatgttcatcaaggatattggtctaaaattctcttttttggttgtgtctctgcccagctttggtatcaggatgatgctggcctcataaaatgagttagggaggattccctctttttctattgattggaatagtttcagaaggaatggtaccagttcctccttgtacctctggtagaattcggctgtgaatccatctggtcctggactcattttcgttggtaagctactgattattgccacaatttcagagcctgttattggtctatacagagattcaacttcttcctggtttagtcttgggagggtgtatgcatcgaggaatttatccatttcttccagattttctagtttatttgcgtagagatgtttgtagtattctctgatggtagtttgtatttctgtgggatctgtggtgatatctcctttatcattttttattgcctctatttgattcttctctcttttcttctttattagtcttgctagcagtctatcaattttgttgatcctttcaaaaaaccagctgctggattcattaattttttgaagggatttttgtgtctctatttccttcaattctgctctgattttagttatttcttgccttctgctagcttttgaatgtgtttgctcttccttttctagttcttttaattgtgatgttcgggtgtcaattttggatctttcctgctttctcttgtgggcatttagtgctataaatttccctctacacactgctttgaatgtgtcccagagattctggtatgttgtgtctttgttctcgttggtttcaaagaacaactttatttctgccttcatttcgttatgtacccagtagtcattcaggagcaggttgttcagtttccatgtagttgagtggttttgagagagtttcttaatcctcagttctagtttgattgcactgtggtctgagagacagtttgtaataatgtctgatcttttacatttgctgaggagagctttacttccaactatgtgaccaattttggaataggtgtggtgtggtgctgagaaaaatgtatattctgttgatttggggtggagagttctgtagatgtctattaggtccacttggtgcagagctgagttcaattcctgggtatccttgttaactttctgtctcattgatctgtctaatgttgacagtggagtgttaaagtctcccattattattgtgtgggagtctaagtctctttgtaggtcactcaggacttgctttatgaatctgggtgctcctgtattgggtgcatatatatttaggatagttagctcttcttgttgaattgatccctttactattacgtaatggccttctttgtctcttttgatttttgttggtttaaagtctgttttatcagagactaggattgcaacccctgcctttttttgttttccatttgcttggtagatcttcctccatccttttattttgtgcctgtgtgtgtctctgcacatgagatgggtttcctgaatacagcacactggtgggtcttgactctttatccaatttgccagtctgtgtcttttaattggagcatttagtccatttacatttaaagttaatattgttatgtgtgaatttgatcctgtcattatgatgttagctggttattttgcttgttagttgatgcagtttctccctagcctcaatggtctttacaatttggcatgattttgcagcggctggtaccggttgtgcctttccatgtttagtgcttccttcaggagctcttttagggcaggcttggtggtgacagaatctctcggcatttgctcgtctgtaaagtattttatttctccttcacttatgaagcttagtttggctggatatgaaattctgggttgaaaattcttttctttaagagtgttgaatattggcccccactctcttctggcttgtagagtttctgccgagagatccgctgttagtctgatgggcttccgtttgtgggtaacccaacctttctctctggctgcccttaacattttttccttcatttcaactttggtgaatctgacaattatgtgtcttggagttgctcttctcgaggagtatctttgtggcgttctctgtatttcctgaatctgaatgttggcctgccttgctatattgggaagttgtcctggataatgacctgcagagtattttccaacttggttccattctccccgtcactttcaggtacaccagtcagatgtagatttggtcttttcacatagtcccatatttcttggaggctttgttcgtttctttttattcttttttctctaaacttcccttctcgcttcatttcattcatttcatcttccatcactgatatcctttcttcaagttgatcacatcggctcctgaggcttctgcattcttcatgtagttctcgagctttggctttcagctccgtcagctcctttaagcacttctctgtattggttattctagttatacattcgtctaaatttttttcaaagttttcaacttctttgcctttggtttgaatttcctcctgtagctcatagtttgattgtctgaagccttctctcaactcgtcaaagtcattctctgtccagctttgttccgttgctggtgagaagctgcgttcctttggaggaggagaggtgctctgctttttagagtttccagtttttctgctctgttttttccccatctttgtggttttatctactttttgtctttgatgatggtgatgtacagatgggtttttggtgtggatgtcctttctgtttgttagttttccttctaagagacaggaccctcagctgcaggtctgttggagtttgctagaggtccactgcagaccctgtttgcctgggtaccagcagcggtggctgcagaacaggggattttcgtgaaccacgaatgctgctgtctgatcgttcctctggaagttttgtctcagaggagtacttggccgtgtgaggtgtcagtctgcccctactggggggtgcctcccagttaggctgctcgggtgtcaggggtcagggacccacttgaggaggcagtctgcccgtcctcagatctccagctgcgtgctgggagaaccactgctctcttcaaagctgtcagacagggacatttaagtctgcagaggttactgctgtctttttgtttgtctgtgccctgcccccagaggtggagcctacagaggcaggcaggcctccttgagctgtggtgggctccacccagctcgagcttcccagctgctttgtttacctaagcaagcccgggcaatggtgggcgcccctcccccagcctcactgccaccttgcagtttgatctcagactgctgtgctagcaatcagcgagactccatgggcataggaccctccgagccaggtgcgggatataatctccttgtgcatcgttttttaagcctgtcggaaaagcgcagtattagggtgggagtgacccgattttccaggtgccatctgtcacccctttctttgactagaaaagggaactccctgaccctttgcgcttcccaagtgaggcagtgcctcgccctgcttcagctcgcacatggtgcactgcacccactgacctgtgcccactgtctggcactccctagtgaggtgaacctggtacctcagatggaaatgcagaaatcacccatcttctgtgtcgctcatgctgggagctgtagaccagagctgttcctattcggccatcttggcttgactctgtaatatcctatagaagtgttgctcctcatatcacaggggctatacaccccgtaatattattcgtaatatcctagggagacattactactaatatcacagaggtgtacaccctttaacattatttgtaatatcctaggaagatattactcctaatatctcactgggtgtacaccctgtgatattattcatgatatcctagggagatgttcctcctaatgtcatcaggggtgtacaccctgtgacatcatttgaaatattctatggggatgttacttttaaagtcacagggggtttacaaactgtgatattatacataatgtgctacacggatgttactcctaatgtcacaggcgtgtacacccagtgatattatttggaatatcctagggggatgtttctcctaatgtcaacggggtttacaacttgtaatactattcgtaatatcctaggcggatgttattcctaatgtcacagaaggtgtacactccgtgatattattttttatatcctagcaggatgttattactaatgtcacaatgcttgtacaccctgcgatattattcataatatcctaagggaatattactcctaatgtcatagcgggtttacacctttttgtattattcgtaatatcctaagggaatattactcctaatgtcatagcgggtttacacctttttgtattattcgtaatatcctagaaagttgttactcctcatgtcacagggtgtgtacaccctgtgatattttttgtaatatcctagtgggatgatactcctaatgtcatagcaggtgtaccccctgtgaaattttttgtaatagttttgggggatgttacttttaatgttacacgtggtatacacaccgtgatattattcgtaatagcctatagaaatgttactcttaatatcaccggggctctacaccctgtaatattattcataatatcctaggggaatgttactactaatgtcacagggggtgtacgccctgtgatatcattcctaatattctaggggatgttactcctaatgtcacagggggtgtacacactgtgatgttattcataatatcctaaaggtatgttactaccaatgtcataatgcttgtacaccttgtgatattatttctaatattctagagagatgttactcctagtgtcgcagcgggtatacaccctgtcatattatttgtaatatcctatgccagtgttcctcctaatgtcacaggtgatgtgcaccttgtgatattattcacaatattccggaatgatgttactcctcatgttccagtgtgtgtacaccctgtgatattattcgtaatatcctagggggaccttactcctaatgttcgagatggtgtaactcccgtgatattactcataatatccgaggtaaatgttactcctaatgtcacaggggatgtatgccatgtatgtacaccccctgtgatattcttcataatattctatggggatgttgttaatattactggtggtgttcaccatgtgcgtacacccccagtgatgtcattcataatatcgtagggagatataattcctaatatcacagtgggtgtaccacatgtgtgaacacccttgatattattcataacatccagggtaaatatgacttctaatatcacagagggtgtacacctggggatatttttcacaatattttagggaaatatggcttctaatatcacagtgggtgtactccatgtgtgtacactctgtgatagtatttttcatatcctagggagctattactcttaatatcacagtgggtcttcaccctgtgatattattcgtatttgaccttgctgccttttttaacccacactacaaaaggaatggaacagataataaaataatgagattaaactgttctgccatgcaaccaccacaggacccttttgatgtccctgtttctcagtctgtagatgaaggggttcagcatgggggtgatcaccgtgtacatcattgaggccactgcaccctttctgggggaagatgacacatctgaactcaggtaccccccaacgacttttccataaaataagcaaacaactgacaggggagacccacaggtggagaaggctttatacttcccacctgatgatgaaacactcagcatggaggaaacaattttatagtaagagaaaatgatccgtgagataggaagaaaaccaaatatggcagcaaggaaatacatgactatgttattggtgaaggtgtcacaacacgcaaggtgtgggagttgagaagggtcacagaagaaattaggaatttccacatccttgatgcaggtcatttgtaaggcaatcaaattgtgcagctgggagtctaaaagactgagaaaaaaaaaaacacaaaactaggaagccacagaaacatgggttcatgatggctgaataatatagagggtgacagatggctacaaaccggtcataggccctcacactcaggagcatgtctttcttccatgcctccaaaaacagcaaagagagacatctgagtcaggcagcctgcataggagatgactctgctgtgagattggatgtccacaatcatcttggggaccgtgttggaggtgaaaccgatgtcagccaaggacaggttggagaggaagaagtacatgggggtgtggaggtggaagtcagagctgacggccaggataatgagcagattctccagcaccatgactaggtacatgaacaggaacagcccagcgagggccagctgcagttttggatcctctgagagttctaggaggaggaattttgaagcatctgttagattctgtgggtctgtatagttcggacatgtatatatatatatatatttactgttgcaagatttaatagagtgaagacagagctcccatacaaagggaggggatccatagagggtagccattgctggctcgaatgcctgggtttatatccagatcattttccctcccactgtgctctcaggccatagatgattggctatttctttacctcctgtttttgcctaattagcattttagtaagctctcttattggtcgggcgtgagctaagttgcaagccccgtgtttaaaggtggatgcagtcaccttcccacctaggcttagggattcttagttggcctaggaaatccagctagtcctgtctctcagtcccccctctcaacaggaaaacccaagtactgttggggaggttggccgactgaccactctaactgcttcttgctgaattggggcatagtaggggttgtgcagttgagatttcctcgggaggggtgccttcgatgtcattaacatcagagcatgtgctagcaggccggtccaggggtccatggtagatcttagtcatggactgcatctggggctccatttgaagaacatttgtagttttacagcttcgattctggaagagacaaacttaacaaggaggttagagatacagggattgaaatgtatggcctgcagtgcaggggattatttctttggcacacttcacaggccctgaccatctgcttaatagttttgaagaggcctggtccagtaaataagaatttggccatctgatgggtgctatcaatgcctaagtgaaagatttggtgaagggttttaagtaattttcattggttagctgcaggcaaaagtatttttccttcttcggtggctagtcatcctgaggggaggaaactatgtcctcctgaggttccccattctatttcttcttctgagtaccgggacttggttttcccgaggggattacccaaactaggggtccttctataagcatttctaatgaagcgtcctgccttgcggttcttttggcttcaatatctgcttggtgattcccttctattttcctttcctttcctttcctttcctttcctttcctttcctttcctttttcctttcctttcctttcctttcctttcctttcctttcctttcctttcctttcctttcctatgactccggcagtgtaagactgccacctctttaggttgctgtacagccaataataatttcctaatggcttcctgatgtttgataggtgttccctcggaagttaggaattccctttctctccatattgctgcatgggcatggaggactaggtaagcatacatagagtctgtatatatatttaccctttttccttctcctaattctagtgcccgagtaagggctattagttctgccagctgaacagtagttcctggagtgaggggattactttcaagtattccattatcactgaccactgcataccccgcttttcgaagtccttttcctacaaagtaacttccatcagtatacaagttgaggtggggatcagtcaagggaacctctaaatggtcccctcaagtggcataggtttgagcaattacttgttgacagttatattctaccttttcttcattgtctggaagaaatgtagctgggttaagagttgcacaagtgtgcagttgcagcactggcctttcaagtaatagagcctgatatttaagtaaacagttgtctgacagccacaagtctcctttagcagtgagtatgcctttcacatcatgagatgtccacacagtaagatctcttccttgtattattttaactgcttcagatactaagactgctactgccaccactacctgtaaacaatgaggccaaccttttgccgctacatcaatttccttactcaggtatgccatgggttgcaagctcatcccttggacctgtgtaaggactcctagagctattcctgttttttctgtgacatataaagaaaagtcttgccccgttggcaagcttaacactggggcttgggttagggccctctttagggcctggaaagctgcttctgcttcaggggtccatcttactaaatgggtattggctttttgagtttccttaattagtgtatataatggtctggctatttcgtcttacctgggaatccatattcggcagaaacctgttatgccaaggaaccctcttagttgctttagggttttaggatgagattaagccagtataggctggatacgttcctcactgagggccctggtgcctttggataattttagccctaagtacgtaacctcctgtgagcagagctgagcctttggtttggaaaccttgtagccacaggtagtgaggaaatttaagagtgcttgggtggcttgatggcacaaggtttctgaacgggcagctaaaagtaaatcatccacgtaccgaaggacaagagtgtccaggtatgagaattggctcaagttttgggctaatacctggccaaatagatgggggctatccctgaaccctttcggtaaaacagtccaggtgagttgagatgtggggtttgaaggttcttcaaaggcaaacaagaattgagagtcaggatgtacagggatgcagaaaaagtcatccttaaggcccaggactgtaaaccactctgcttcctctggtatttgagaaagcagagtgtaagggttaggtacagctgggtatagagggacaagggcctcattgataatcctgagatcttgcactaacctccactgtccgttgggtttctgtactcctaaaattggagtattgcaggggctattgcacggttttactaggccttgggcttttaggtccttaacaatcttttggagtccttgttgggccttggggtctaaggggatactgcctttggtagggaaaggaggcagaatcctttagtttgacttgaacaggatgggtattctttgctcatccatattgtccttctgttacacagacttcaggattaattccttcctcaagcagggaagaacaaatgggtgttccttttcctatgttcaggtgtgtaatagcccctgcttttgctagaatatctctccctaacaagggagtggggctttcaggcataattagaaaagcatgtgaaaacagtaaagctccctagtcacaacttagtggctgggagaagtatctagtgactggctgtcccaggacccctcgaatagtgacagatctggaggacagttgtccaggacaggagagtaagactgagaaggccgtgccagtgtccaggagacaattaacctcctggctgtcaatggtcaagcatacccagggctctgtgagggtgatggcatggactggcacttgccccgggcaccctcagagtttggacatattttgagtagaaaagaggattgaaaaatagaaaacaagtaaaccaacacccagaactgtgtctgcattttggatataagcaattcacaagtaatgttttcagatttcagagcaatccacactcagcaatattgtgcagttctgacaaactcaatttttttataattcttttattgagttttgtgttattcacttcttgctgtacacacctgccttagagacactagattcaagaatgttccaagaaccagatcatcatatataacaaattcataattgctagaaaatacagcctatcttttccaaagaaaaatatgtaataaaatcattctctttgctttaagaaaaagtttatcctaattaaaagaaattaagaactcaaatgtattattttattctaatagattgccacaagttcccttgatttagaacatttataaacactgtgtaacagctgagaccaggtcatctggaaataaaattatagttgatagttcataatcagaaaatatttccagatgccagttatgttctctgacttttctccttcaagagagtaattgcttactcgagtaggtgggccttgttttaaaattcatgtaagatataacttctgtccctagcttaggcggacttagagatttcataagaaagtttggccagacacagtggctcacacctgtaatcccagcactttgggaggctgaggtgggtggatcacaaggtcaggagatcaagattatcctgggcaacatggtgaaaccatgcctctactaaaattacaaatattagctaagcatggcagcatgcacctgttgtcccagctatttgggaggctgagacaggagaatggcttgaacctgggatgcagaggctacagtgagccaagatcacactgctgcacttcagtctgggtgacagagcgagactccatctcaaaaaaagagagaaagttttagttaaatggacataactggagatcgcttttaagatggccaaataggaacagctctggtctgcagctcctagtgagatcgacacagaagatgggtgatttctgcatttccaactgaggtacctggttcttctcattgggactgcttggacagtgggtgaagtgcacagagggtgaactgaagtagggcagggtgtcacctcacctgggaagtgcaaggggtcagcagatttccctttcctagccaagggaagccgtgacagactgtatctgaagaaacggtacactcttttttttttttcaatttttaaaatagctttattgacatataattggcatccagtacacttcatgtgtttacaatataaaatttgatctgcattgacacaggcacacacctacaaaaccatcacaacaatcaaccatcaccagcacatccatcaccaccaaaaagagaaacggtacactcttgaccaaatagtgcacttttcccattgtcatagcaaatagcagaccaggagataccctcccatgcctggcttggtgggtgccacagccacggagacttgctcactgttagcacagcagtctgagatcaacctgtggggctgcagcttgatggggagaggggcatctgccattgctgaggcttgagtagctcacagtgtaaacaaagctgccaggaagctcaaactggctggaacccaccacagctcagcaaggcctactgcctctctagatttcacttctgggggcagggcatagcagaacgaaaggcagcagacagattctgcagacttaaacatccctgtctgacagctctgaagagagcagtggttctctcagcatggcattcgagctccaagaacagacatactgcctcctcaagtgggtccctgaaccctgtgtagcctgactgggagacatctcccagaaggggagcaaagacacctcaaacaggtgggtgcccctctcagatgaagcttccagaggaaagatcgggcagcaatatttgctgttctgcagcctccactggtgatgcccaggcaaacaggttctggaatcgacctccagtaaactccaagagacctgcaactgaggggcctgactgttagaaggaaaactaacaaagagaaaggaatagcatcaacatcaacatcaacaaaaaggacatccacatgaaaaccccatctgtatgtcaccaatatcaaagaccaaaggtagataaaaccacaaagatagggagaaaccagagcagaaaagcaaaaaattaaaaaaaaaaaacaacagagcgcctcttctcctccaaaggattgcagctcctcgccagcaagggaacaaaactggatggagaatgagcttaacgagttgacagaagtagacttcagaaggtcagtagtaacgaacttctctgagctaaaggagcatgttctaaccaatcacaaggaagctaaaaaccttgaaaaaaggttagacgagtggctaactagaataaacagtgcagaagagaccttaaattacctgatggagctgaaaaccacagcaggagaacttcatgatgcatgcgttatcagtgactgaaggtcaaattaatgaaataaagtgagaagaatagagaaaaaagagggaaaaaacctaacaaagcctccaagaaatatggggctatgtgaaaagaccaaatctatgtttgattgatgtacctcaaagtgatagggagaatggaaccaagttagaaaacactcttcaggatattatccaggagaacttccctaacgtagcaaggcaggccaacattcaaattcaggaaatacagagaacaccacaaagatattccttgagaagagcaaccccaagacacataatcgtcagattcaccaaggttgaaatgaaggaaaaatgttaaaggcagccaaagagaaaggtcaagctacccagaaaggaaagtgcatcagactaacagcagatctcttggcagaaaccctacaagccagaagagagtgggggccaatattcagcattcctaaaggaaagaattttcaatccagaatctcgtatgcagccaaactaagcttcataagtgaaggagaaataaaatctttcacagacaagcaaatgctaagagattttgtcatcaccaggcctgccttacaagagctcctgaaggaagcactaaacatggaaaggaacaacctgtaccagccactgcaaaaacatgccaaattgtaaagacatcgatgctatgaagaaactgcattaattaatggacaaaataaccagctaacatcataatgacaggatcaaattcaaacatagtaatattaaccttaaatgtaagtgggctaaatgcccaaattaaaagctacagattggcaaattggataaagagtcaagacccatcagtgtgctgtattcaggatacccatctcatgtgcaaagatgcacataggctcaaaataaaaggatggaggaagatctaccaagcaaatggaaagcaaaacaaacaaacaaacaaaaaaagcagggattgcaatcctagtctttgttaaaacagactttaaaccaacaaagatcaaaagagacaaagaaggccactacataatggtaaagggatcaattaaacaagaagagctaactatcctaaatatatatgcacccaatacaggagcacctagattcataaagcaagtccttagagacctacaaagagactcccacacaataataatgggaggctttaacaccccacttcagtattagacagatcaacaagacagaaggttaacaaggatatccaggacttgaactcacctctggaacaagtggacctaatagacatctacagaactctctaccccaaatcaacagaatatacattcttgtcagcaccacatcacacttattctaaaattgaccacataattggaagtaaaacactcctcagcaaatgtaaaagaacagaaatcacaacaaattatctgtcagaccacagtgcaatcaaagtacaattcaggattaagatactcactcaaaactgcacaactacatggaaactgagcaacctgctcctgagtgactactgggtaaatagcaaaatgatggcagaagtgaagatgttctttaaaaccagtgagaacaaacacacaacataccagaatctctgggacacatttaaagcagtgtgtagagggaaatttatagcactaaatgcccacaagagaaagaaggaaagatctaaaattgacaccctgacatcaaattaaaagaactagggaaggccaggcgaggtggcacatacctgtaatcccagcattttgggaggctgaggcaggcgaatcacctgaggtcaggagttcgagaccagtctgaccaacatggagatactccatctctactaaaaatacaaaattagcctggtgtggtggcacatgcctgcaatcccagctactcaggaggctaaggcaggagaatcccttgaacctgggaggtggaggttgcaatgagccaagattgagccattgcactccagcctgggcaacaagagggaaactccatctcaaaaaaaaaaaaagaagaagaaaaaaaaaaaagaacaaggactagggaagccagagcaaagaaactcaaaagctagcagaagtcaaaaaataagttcagagcagaactgaaggagataagagacacaaaaaacacttcaaaaaaatcaatgaatccaggagctggttttttgaaaagatcaacaacacagaccgctagcaagactaataaagaagaaaagaagaaataatcaaatagacacaataaaaaatgataatggagatatcaccactggtcccacagaaatacaaactaccatcagaatactataaacacctctatgctaataaactagaaatctagaagaaatggatatattcctggacacatacacccacccaagagtaaaccaggaggaagttgaatctctgaatagaccaataagaaggtctgaaattgaggcaataattaatagtctaccaaccaaaaaaagtccaggactagacagattcacagccaaattctaccagaggtataaagaggaactggtaccattccttctgaaactattccaatcaacagaaaaagagagaatcctccctaactcattttataagaccaggatcatcctgataccaaaacctggcagagacacaacaaaaaaagagaattttagaccaatatttctaacgaacatcaatgagaaaatcctcagtaagatactggcaaacagaatccagcagcacatcaaaaagcttatccaccactatcaagtcagcttcacccctgggatgcaaggcttgttcaacatacacaaatcaataaacgtaatccatcacataaagagaaccaagaacaaaaactacatgattatctcaatagatgcagaaaagacctttgacaaaattcaacagaccttcatgctaaaaactctatataaactaggtattgatggaacgtatctcaaaataataagagctatttatgacaaacccacagccaatatcatactgaatgggcaacaactggaagcattccctttgaaaactggcacaagacaacgatggcctctctcaccactccaattcaacatagtgttggaatttctggctagtgcaatcaggcaagagaaagaaataaagggtattcaattaggaaaagaggaagtcaaattctgtttgcagacgacatgattgtatatttagaaaaccccattgtctcagcccaaaatctccctaagctgacaagcaacttcagcaaagtctcaggatacaaattcaatgtgcaaaaatgacaagcattcctatacaccaataatagagagctaaatcataagtgaactcccattcacaactgtgagaaagagaataaaatacctgggaatccaaattacaagggatgtgaaggacctcttcaaggagaacaacaaatcactgctcaacgaaataaaagaggacgccaagaaacggaagaacattccatgctcatgggtaggaagaatcaatattgtgaaaatggccatactgcccaaggtaatttatagattcaatgccatttccatcaactagcactaattttcttcacagaattggaaaaaactactttaaatttcatatggaaccaaaaaagagcccacatagccaagacaatcctaagcaaaaagaacaaagatggaggcagcacgctacctaacttcaaactatactacaaggctatagtaaccaaaacagcatggtactggtaccaaaacagatatatagaccaatggaacagaacagaggcctcagaaataacaccactcatctacaaccatctgatctttgacaaatctgacaaaaataagcaatggggaaaggattccctatttaacaaatggtgctgggaaaactggttagccatatgtagaaagctgaaactggatcccttccttacaccatatacaaaaattaactcaagatggattaaagacttaaatataagacctaacaccataaaaattctagaagacaacctaggcaatatcattaaggacataggcgtgggcaaagacttcatgactaaaacaccaaaagcaatggcaacaaaagccaaaatagacaaatgggatttaattaaactaaagagcttctgcacagcaaaagaaactaccatcagagtgaacaggcaacctacagaatgggagaaaatttttgcaatctatccatctgacaaagggctaatatccagaatctacaatgaacttaaacaaatttacaagaaaaaaagccccatcaaaaagtgggcaaagaatataaacagacacttctcaaaagaagacatttatgcagccaacagacatatgaaaaaaagctcatcatcacttgtcatcagagaaatgcaaatcaaaactacaatgagatctcattttacaccagttagaatggtaatcattaaaaagtcaggaaacaacagatgctggagagaagtggagaaataggaacactttcacatgttagtgggagtgtaagttagttcaaccattgtggaagacagtgtggcaattcctcaagtatctagaactagaaataccatctgacccagcaatcccattactgggtatatacccaaaggattaaaaatcattctactataaagacacatgcccacgaatgtttattgtggcactattcacaataccaaagacttggaaccaacccaaatgtccatcaatgatagactggattaagaaaatgtggcacacatacaccattgaatactatgcagccataaaaaaggatgagttcatgtcctttgcagggacatggatgaagcctgtaaccatcattgtaagcaaagtgtcacaaggacagaaaaccaaacaccacaagttctcactcaggtgggagttgaacaatgagaacacatgaacaaaatgcagggaacatcacacaccggggcctgtcagggggtaggcagctgggagagggatagcattaggagaaatacctaatgtaaatgttgagttgatgggtgcagcaaaccaacatggcacatgtatacgtatgtaacaaacctgcaggttgtggacatgtaccctagaacttaaagtataataaaaaaaaaatggacataaccataggccatcacttactacaccaatgtccacagtgtgcaatacagctgtcaatgattaaacaataatgaagttctaagaacattttggtttactttttttgagtctggagtaatgtgaaagtctaaaatgtgtgtcagtccaagcaataaggtttacctgcccccatttctttctgcctctatttcttttttattagacctatgaaaagctcttccttggtttttgaataattgaatgctgtgaatactaatcaatagaatcataggacccacgtcatgacatagaaacaaacaagtgttgttttatcatctctagttctatggcatgttgctggaagggatgaaagaacaggcagcaaataattgagtatgttgggctgggcatggcggctcatgcctgtaatcccagcactttgagaggccgaggcaggcagatcacctgaggtcaggagttcaagaacagcctgaccaacatggagaaaccccatctctattaaaaatacaaaattagctggccatagtggtgcatacctgttaccctagctactcaggaggctgagcaaacaaatcacttgaacttgagaggtggaagttgctgtgagctgagatcacaccattgcacttcagcctgggtaacaagagtgaaactctgtctcagaaaaaaaaaaaaaaagaattaagtaagtcgaagtcacactgatcacagccaatttttgtgaaccaaggaaggttctattcaataattaacatagatttttacttttgctatctcctgtgtgccacgcaaaatatagactctggagaatcagaagcaaaagaaactcacttgttcctctcacaatactcagtacttacttagataaggacaaaataaaatgtcctgtctggaatgcagggaaaccagaacttcaggtcaggggatacttcagttgaattgtatggagattaagcttaaaatattatgaatgtatcttaaattcactttgtctttacttgatacatccatcacatagacatcatgcagtgggcacctacaataggtttaatcactgctcacttctgttggatcaacaagaaatcaactcatatgacagtgatgagtctcagaatgagaggaggtgccagctgggcctcttgggttgagtaggggctcagaaagctgtgaaactcactcatttccctgcatcaggacttacttcagtcctggatgaataatattgaagatatatgcttaaaatattcctaacaccagaatttgtgcattgtgttttcttccccaagaaagctataaacagcaaaaaaattttgctgtaagtttccctgtgtcctatttctcttccccctaccccaaaactaaaaggaatgttaactgctcatttttctgtgaccagcagaccttatctatgctcccaattccaatttcttataaaagtactttgtaaggtcctgtaagatcctgtctcctttaccatgctactgcaaggtcataaagtagctaaaacctaagttgcaattccagttttcctcaaaatctaagacatgtcacaaaataatttactgcctttgtttctcaatctggtaacatcttcccaccacacatatttcctgccttaaagagttgaaaaggcaattgtataatctcactctggttacctgttcaggacaccttccacagtgtgctttcactcagctcaataaagcctacaactttttctctctctcggtccttgcctctatcactcaccatagtcagccaccacaccaattctttggtgtggctaggcaagaaccttaggtgttacattttggtgagccaggcaggatactccaggaaaggcatctagatcatcacactgtgagtacaatcagacctcttttgcttgctattctgtcctgtccttccttagaatttggaggctaaactaggcacctgtcagccacttaaaggtgattagtgtggctgctggactaaagacacgggtgtcaggctgtctggaaaaggttctctaacaacccctgacccttcaggtttgggagcattggttggcctggaaccagttccaactcttttgctttccatggtggttctgaagtacacctgggagtgctcagtggaaatcttagtctcccagatatcctagttgagaccacagccctgccagaggctccccctgcatgggttagtgagcatgagacagccacatcttctgactcccacctcctaatgagtcctaatgtccaccagttagacttctttcctcatcttgtaagcaaggttattcccactagacaggatcaagattccctatttagaagacttaaagtcttggggtggcacccagaagatccctgttcatggtgccctctagggttcaggcaggtgtcaccatttgatggctattttgaaggaccagttccccaccatagtgtgtagtcccccacatcaggataatttaaagataggtctgtaattttcatgtggatagtagaagccttagggcatttcctccattgctccccagataaactttccccttccttggggcctatcaagtacaatctatggtgcatgggtacagctcttagagccattgaattgttgtttcaaccatttaataattggtattggaagaaaatgtagtcagttgggacacaggatactggtaccaccttgagaggggggcttactcttttgatggcaagtggggacagaaggctaaagtacagcagctgttctctcagccctggtctggaggacatccaccaccccctttaagcttactaagcctcctgttgctaattcagagatttctccttgaaggacagttttatggccaggaccgcataaagtgggccttagcattcaagcatcagtggtgcccccaacccaggccttgccaccctggaacaggttggatgtattggcagaaggaccataataaatccaacagtccttgtgccccatttagtagtcaatgggtgcatggcaggggcaagggaagtttccatcctgccagtaagcatggttaaatctggtagatggagagctcaggaaaagcggccatgagctttcagcacaattagtcctgacccttaggggacaccctaagggaagatgagtcccaggactaaccaggggtgtgggcatccctgtgtttaaaattccagatgggcaccacaccttccaaaccggacactcccttaagatgtatcctgaataactgggacaaattcgaccctgaaaccttaaaaaagaagcagctaattttcttctgtaccactgcctggccacagtattccttacaaaatggagaaacttggccccctgagggatgtattaattataacacccttctacaactagctcttttctgtaagcaggaaggtaaatggagtgaagtcccttacgtacaggctttctttgcccttcttgacaatactgccctgtgccaagcctgcgagctttgcccaaatgacagaggcccacaattacctccatattcagggcctcttccctcagccccactctcctcctgcactgactctcctccatctggcctcactgaagtgttaaaggcaaaatggaaagagaacgtaaactccgagagccaggcacccgaactatgtcccttacaaacagtaggaggagaatttgggcgcattcacatgcatgcccccttctcactctcaaatttaaaacaaataaaggcagatttagggaaattcttggatgatcctgataaccatatacatgtcctgcaaggattagagcagtcctttgatctaacatggagagatatcatgttacttcttgatcagaccttaagtcctactgaaaaaaaagcagctttagcagcagcccagcaatttagggatcgatagtaccttggccaggtaaacaatccattgaatggccttggaggagagggaaaaattgcccacaggggaacaggcagtccccactgtaaatccttattgggatactgactcagatcatggagattagagccacaggcatttgctaacttgcattttaaaagggttgaggaagactaggagaaagcctatgaactactcaatgctatccaccattacccagggaaaagaagaaaatcccctcagcctttctagaaatgctgcgggaggctctaagaaggcacacccccgtaactccggattccctggaaggccaacttattctaaaggataaacttatcacctaagaagcggccgatattaggagaaaactccaaaggtctgccttaggcccagaacaaagcttggaggcattattaaacctgccaacctcgttgttctataacagggaccaagaggaacaggccaaaatggaaaagcaagataagagaaaggctgcagccttagtcttggctctcagacaggcagaccttggtggctcagagggaaccaaaagaggagcaggccaattgcctagtagggcttgttatcagtgcggtttgcaaggacactttaaaaaagattgtccaactagaaacaaactgccccctcgcccatgtccaatatgccaaggcaatcactggaagtagcactgccccagaggatgaaggccccctgggccagaagcacccaaccagatgattcagcaacaggactgagggtgcctggagcaagtgccagctcatgcaatcaccctcacagagccctgggtaagtttgaccattgagggccaggaagtacacttcctcctaaacactggcccagctttctcaggattaatctcctgccctggaagactgtcctcaaagtccattactatctgaggaatcttaggacaccctgtaaccaggtattactctcacctccagctgcaattgggagactttgctctcttcacatgcctttcttgttacgcccaaaagtcccacacccttattaaggagagacatattagacaaagctggagctattatctacataaatatagggaacaaattacccatttgttgtcccctacttgaagaaggaatcaactctgaagtctgggccttggaaggacaattaggaaaggcaaagaatgcccatccaattcaaatcaggctaaaagaccccaccacttttccttatcaaacgcaatatcccttaaggcctgaagctcacaaagaattacaggatattgttagacatttaaaagctcaaggcttagtaagaaaatgtagcagtccttgcaacaccccaattctagaattacaaaaaccaaatagtcaacggagactattgcaagacctcagaatcaatgaggcagtaattcctttatatcctgctgtacctaacccctatatgctgctctctcagataccagaggaagcagaatagttcactgttctgcacctcaaagatgccttcttctgcattcccctgcactctgactccctagtcaccctacaaagccagcttaattctctcgctgcagtagtcctccaaaactgaagagccctagacatagtaacagctgaaagaggaggaacctacctcttagagaagaatgttgctatttcattaaccagtcaggaatcattactgaaaaggtcaaagaaataagagaacggatagaaagtaggaaaaaggagcttgaacactcaggactggaatatgtttaaccaatggatacctgggctcctcccctttctaggccctgtgacagccatcctactattactcacctttaggccttgcatttttaacctccttgtcaaatttgtttcctccaggatcgaggccatcaagctacaaatggtcttacaaatggaatctcaaatgagctcaactcatggcttctagtgagaaaccctggaatgacccgttggtccctcattagcctagaaagttcccctctggaggacaccacaactgcagggccccttcttcatccctaaccagcaggaagtagctagaagaaccaccactcagctcccaacagcagttggggtgtcctatttacaggggggactgagaggaggtgccagctgggcttcctgggttgagtaggggctcagaaagctgtgaaactcactcatttccctgtgtcaggacttacttcagtcctggatgaataatattgaagatatatgcttgcttaaaatattcctaacaccaggatctgtgcatgtgttttcttccccaagaaagctataaacagcaaaaattttgctgtaagtatccctgtgtcctctctcccttccccctcccctgaaactaaaaggaatgttaactgcccatttttctgtgaccagtggatcttatctatgctcccaattccaatttcttgtaaacatgctttgtaacgtcctgtaagatcctgtctcctttgccatgctgctacaaagtcataaagtagacaaaacctaagttgcaattccagttttcctcaaaatctaagacatgtcacaaaataatttactgcctttgtttctcgctctggtaacatcttcctaccacacctattccttgccttaaagagtttgaaaggcaattgtataatctcactctggctacccattcgggaccccttccacactgtggaaactttgtactttcacaccaattctttggcgtggctaggcaagaaccttagacgttacaagaggattggcatctcaccccttgccatacagataagtagaaagggtggcattcaaaattaatggccagtctctaagtcccaggcactgaacttcatggtcttccaacactcaaaaagttgtaagcagaggtcagaggtcttaaccatagccatatctgagttgcattttgaaacagtttccagcttcctcagtaggaatggaagccaaactccaaatttatgactcctttgaggaagtcaagagctgtaaggaaagccaggggcaggggcaagggagagatgccccttgaatgatcctgtgccagttctttctgggatctttgatgtcatcttagctgccctttctatacttgacatagtgaacgtggcatccactggtctagctgtggtctaccaggaacccccaaagggaagggcacagtgagcaggggcatctgcccgagtgacaaggatttgagagggcaggttggatgcagggagaggactggccaaatgccatgagtctggacgtagactgcctggttcaaatgggaattcacccttttcgacttcatgatctgatacaagttatatgaaaatgcgtcacaacttttctagtctgttaaatgataatgaaatgtgcactaataactgggagaagactacacagatgaaatgaaacaagctgcatagaccacagagctaagaaggtggcacttaggaagccctcagtaagagttcttggtgccatggtatctgccatcttcctttttatcctcatcatcaccttcataatctttctgttgtgcttagggaatagtttagaggaactcattccctgctatcatgagtgagatgtctatgaaaaggacaaccattggtgggggggaagcaaaattttgaataacatttctgagacccccaccacaaccaagaacagaaactccacagtctgctgagctgacagtttgcatattggtctcctcccatctgcccactgcactctcctgtttgtcctgaggatgaggaaacaaagcaacgctcccaaccatccctcagcactcactgaactgcccctcccctctgctgggccatgaccacggagaacaggtccactgtcctccctgcgtggtgcacgatggagtctcagagtccgtcctcaagactggcaagaagacagggtgagacatgagcctcctgatagaggtgatgggtgtggagcccacaggactggaacctcacactgcagggctggaggcacagactgagtatttactattctatggcctgtggggctcagggcacagagctcctcattagccaaagtcacccaaattccccaacttctaaggatttcctcataataatgcaagaagaagagaaaagttagtgtccattgaagctttggggctcttcctctaatcaggagaaagcttgtgtatattattcgcttctttcttttcttcttaaagatccaactgctttaattttcatcttttattttgggaaatataccacatataaatattaaaaattataaatatatattacttcatatagaatggccagtataaacatttacaatttccactatttttcagtttacagtttaatgacattaagtacattcacattgtttagcaaccatcacctccatcatctccagaacagttttatctttcaaaatggaaaagggacccattaaccaaactctccattcctctctctcgcccacccctgggggccaccattctattttgcaactctatgcatttaactactctagacacttgatataagtggaatcacaccatgttttgtttgtttgtttgtttgttttggagacagaatctttctctgtcgcccaggctggagtgcagtggcatgatctcggctcactgcaacctccacatcgtgggttcaagcgattcttgtgtctcagtctccggagtagctgggattacaggcgtgcgccaccacgcccagctaatttttgtatttttaatagagacgagctttcaccatattggccaggctggtctcaaactcctgaccttaagtgatccacctgcctcagcctcccaaagtactggggttacaggtgcgagccactgagcccggtcgtgtttatccttttgggatttatgtatttcactgacgatgatgtcttaaaggttcatccatgttgcagcctgtgtcacaagtgcctgccttttttttttttttttttttttttttttttttaatggagtctcactctgtcacccaggctggagttcagtggcacaatctgggctcaccgcaacctccgcctcccaggttcaagcgatcttgtgcctcagcctccggagtagctgtgactacaggcatgcgccaccatgcctggctaattttttgtatttttagtagagacagggtttcaccgttttggccaggctggtctcgaactcctgacctcaggtgatcctcccacgttggcctcccaaaatgctaggattacaggtgtgagccactgcgctggccagaagtgcctgcatttttaaggctgaatagtcttccattgtatgaatgaactgcagtgtgctttttcattcttctgtccacgaacgcttgggttgcttccacatttttgctgttgtgaataatgctgctatgaatatgggtgtacaaatatctcttccactgctggcttctaattctttttgggaggtacccacgaatgtaactgtgggatcatctgataattctgtttttcatttttcaaatacactccatactattttccctgttcctgcacaattttacgttccctccaatcatattcgagcattcctacttccctctagtttcaccattgcttgtttgtttatcatatccatcctaatgtgtggtatcacattgttggtttgatttgtacttccttaagattagcgattttgaacatcattttatatgcttattggccattgctatatcttctttttttttgagtcgcagtctcactctgtcgcccaggctggagtgcagtggcacgatctcggctcactgcaagctccgcctcccgggttcaagccattctcctgcctcagcctcccagctagctgggactataggcatctgccaccacgcctggctaattttttgtatttttagtagagacagggtttcactgtgttagccaggatggtcttgatcacctgacctcgtgatctgcctgcctcggcctcccaaagtgccgggattacaggtgtgagcccccgcacctggccgctatatcttctttagggacatgtctactcaagtcttctgaccattgttaatgggatgccttgggtttcctgttgtttacttctagctgttctttgtatattatggataacagcctcttttcagatgtatgatttgcaaatatttttcctaatccatgggttatcttttcactcagttcacagtgttttttgatgcacaaaagtgtttgtcatttagatgtaatccaaggaatctaattttcttttgttgcctatgcttttggtgtcttatcccagaaagcattgtccactctgatgtcataaaggttttggcagcgttttcatttaggcatgttatagttttagctcttgggcgtaagtctttgatccagtttgtgttaatttttgtacctggtgtgacatagggtccaccttcattcttatgcatgtggaaatcaagtttctccaacacgatttgttgaaaagtatgcttttccaccaatgaactttcttggcacctattttaaaaatcattgggacatatgtgtgggaagttattcctgggctcaaaaacaaacaaacaacaacagataaaaatacagcatgggccaggtgcggttgctcacgcctgtaatcccagcactttgagaggccgaggtgggcggtcacctgaggtcggaagttcaagtccagcctgaccaacagggagaaacctcatctctactaaaaatacaaaattagctgggtgtggtggcacatgcctgttatcccagctattcgggaggctgaggcaggagaatcacttgaaacccaggaggcagaggttgtggtgagctgagatcacaccattgcactccagcataggcaacaagagcaaaactccacctcaattaaaaaaaaaaaaaatacagcatgatttcgagtcccagtctagcctcaaaaagaagagtatagaagggtgtgattggagcggaaaggtaatagcttaaaaactagcataatgagaaagttaggaagcttctttccaagccatctggaaatattcaataaattcctgtgaactaaaatttccctactgtactgtcaaacagtcgaactcatttattccatctttctgtatttttgtacccaattatccacttctctccattccctatcccactccttttcttcccagcctctgctaaacaccttgatactctccaccttcatgagatttctttgcgtgtgtgtgtgtgatggagtctcgttctcttgcccaggttggagtatagaggcatgatcttggctcactgcaacctctgcctcctagtttcaagcgattctgctgcctcagcctcccaagtagctgggactgcaggcatgcaccagcacacctggctaatttttgtatttttagtagagatggagtttcaccatgttggccagtctgatctccaactcctcagatggcctcaagtgatccgtctgatctggcctcccaaagtgctgggataacagacatgagccaccacccctggccaagattttctttcttgttcctacatataagtgaggacatgtaatatttgtcattctgtgcctggcttatttcacttaatatactgacctgcaatctcacccatttctgctgcagtggagaggattttattcatttttaggctgaataatacatcattgtgtgtgtataccacagttttttaattgaaacaaattttttaaaaatatatattttaaaaatgtctcagaatgtgaaactttagggatactgtgaccattttattcttttctatttcccattttatgtatgtacaagtgtgagataaaacagcaatcaatgtgtgtataaatctataacttcaacaaatgtaaaatgaaaatgctaagtggtaagaaagaacagcataataaaaatttgcatcatgtttaggacaatgcatttgaagataatatttgaagaaatcatattacaattaacttctgttcttattcattggagcttgatccctctaggaacttcatcattgaaacagtctctggtgctttaaaaaaaaaaaaaaaatctgcatgcccacacaggtgcaagtaaatcggaatgtcaggtaatgagacccaggcctcatcatgtctaagctccccaggtgatttcaatcaaagccaacgttgagaaccgaaccggtgacacggatctctacacataacctgcctaaatagattccctagaagcagtttataaggaaattccacatgaactgtggaaaaggatgtgaatttgatgtacagtatgtcctgacttaacatcttggaaagtctcttggaaactgcacgtttaagaaaaattatgtatagtgaaaccaaggtattcctcatcaacactataactaaacaaccttagacaaaccattggtgttggaggacatgctgcacattgtttccataaagtcaattttcagggaattacaaaattacaaaatgaattacttcctgtatataaaaagatggttgtgatttcacctggagtacagggttattgctgagaaactaaaggaggccgcccagatatagaggattcagtcatgatgtttatgctaaacaaaggatcccagaatactcacccattccagttaaaggcataacaaagaaagcaatattcacataggaaatgtggaaaggaataaaagccatcaagcaacaaaaataatgtgacaaaggggttaggatttgcagatgtacagatttaatgtggttgccctttcttactcacacaagagaaaggatggaacagatcatgagatttgactgttctgctgcgcagcctccacagggcactatgaatgtccctgtttctcaggctgtagatgaaagggttcagcatggggatgaccacagcgtacatcactgatgccaccactccattcctgggagatgatgacacagctgaagtcaggtacacgccaatgcctgtttcataaaataagcaaacaactgccaggtgagagccacaggtggagaaggctttatacttcccatctgacgatggaattcttggaatggaggagacaattttatagtaagacaaaaggatccctgaaatgggaagaaaaccaaatatagggatatctaaaatacataatatgttattgatgatgctgtcagaacaggcaaggttgagaagttgagatgggtcacagaaaaaaaattatagatttccacattcttgaagaaggtgagttgtgtaacacaatccagctgtgcagctgggaatccaacaggctaaggaaaaaggacaccaaaactaagaagacacagaggtgaggattcatgatgactcggtagtgcagggggtgacagatgggcagatggccacaaatcggtcataggccatcagagtcaggagcatgtcttctatacatgcaaaaaggacaaagaaagacatctgtgtcaggcagcccgcataagagatgactctgctatgcgactgcatgtccacaatcatcttgggaactgtggccgaggtgaaaccaatgtcagcccaggacaggttggagaggaagaagtacatgggggtgtggaagtgggggtcagagctgccagccaggatgatgaacaggttcctcagcatcgtgaccaggtacatggacagggagagcccagtgaggacgggctgtctcccagtatcgcagggggttgtacacgccttctgggatattgttcctaatatccagaaggcaagaggatgatattactcccaatatctaagggagtgtaccaccccctgtgatactgttcctaatatctgggggagagaggatattactcccagtatctcagaaactgtacacccctgctgtgatattgttcctaatatccagtgggggagagaatgacatttctcctaatatggtaggggttgtacaccttcctgtgatattgttcttaatatctaggtgtagagagcataatattacctccaatatcgcacggaatttacaccacccctgtgatattgttcctaatatccagtgggggagagaatgatattactcccaatatcgcaaggggtttacatcactcctgtgagattgtccctaatatccagggagggagaggatgttattactcccaataccgatgggggtgcacacaaccctgtgatattgtacatgatatctactgggggagatgatgttattactcccaatatctcagggggtgtacaccgcccctatgatattgttcctaatatccaagggaagagaggaagatgttaatcccaatgttgcaacaggtgtacaactccctatatttttgtttttaagatccaggggggagaggatgatattactcccaatattgcagggggtgtacacacccctgtgatggtgttcctaatatccagtgggcgacaggatgatattactcccaatatcacagggggtgtacacaaccctgtggtattgttcctaatatctagagtaaaataggatgatatgactcccaatatcgcagagggtgtacactcctcctataatattgttcctagtacccagggagggagaggataatattacattgaatattgcagagaatgtacacccaccccctgtgatattgttcctaatatccaaggagggagaggatgatattactcccaatatcgcagaggcagtacacctcacctgtgatattgttcctaatatccaaggagggagaggatgatactactcccaatatcgcaggggtgtacacacaccggtctaaaatctaggggagagagggtgatattacaccaaatgtcacagggactgtacatccctcctgtgatattgttcctaatatccaagggggaagaggatgatattgctccctatatcaggggaagtgacacccccctgtgatcttgttcctaatatccagggaagaagaagatgatattactcacaatatcagaggaagtgtacactcttcttgtgatttagttcaggtgatatctcaggtgaggaggggatgatattactttcaataccgcagagggtgtacacacttcctgtgatattgtttctaatacccgttgcaggagaggaggatattactcccaatattgcagggagagtacacccactctgtgatatcgtttctactatccaaaggggaagaggcttatattactcccaatatcgtagaaagtgtatacctaccctgtgatactgttcctaatatccagggggagagttgaagatattactcccaatatcgcagcaggtgtacaaacccctgtgattttgttcctaatattaagggtgaggggggaaggatgatattactcccagtatcacagtgggtatacaccacctttgtaatattgttcctagtatccagagggcaaaaagatgatattactcccaatatcccagaaagtgtacacccccccttcataatatcctggggggagagaatgatataactcccaatatcacaagaggtgtaccttcaccctgtgatatttttcctaatatacagggtggggaagaatgttatgactcccaatattgcatggggtggacacctccagtgtgatattgtttctaatatccatgggggagaggatgatattactccaaatattgcaggggttatacacacccccgtgatattgttactattatcaaggaaggaagaggataatattaattccaatatcgctggtggtgtatacccaacctgtgatgttgatcctaatatccaaagggggagaggataatattactttcaatatcgcattttgtacaccccctgtgatattgttcctaacatccaggggaaacaaggatgatattgctcccaatatcacaggggatgtacacccctccatgatattgttcttaatatccatatggggagaggaagatattactccaaatatctcaggtgttgttcacaccccctgtgatattgtcgctcatatccagtgagggagaaaataatattacttccaatatcccaagtggggtgtaccccacctgagatatcattcctaatatccaggtagggagagggtgatattactcccagtatcaaagggtgtgtacactgcccttgtggtgtggtttttaatatccagggggtgagaggatattactcccaaagtagcagagggtgtacactgcccctgtgatattgttcctaatatcaaggggggagaagattatattactcccaatatcacaagggttgtacaccccctgtgatattgttcgtaatatccagggagggagaggatgacattacattcaatatcacaagaggtgtacatccccactgtgatatcgttcctactatccaagaagggagtggatgatattactcccaatatcgcagtgggtgtacgttacccctgtgttatagtttcttatattcaggagggacaggataatataaccccaaatttggccggtggtttgaccccccttgtgatattgttccttatatcccagggcggggaagacaataatactgccctcagtatcgcgggaaatgtacgtcaccctgtgatatttttcctaatatccagagggagagagaatgatattactcccaatatcgtagaagtgtacagcccccctgtgatattgttcttaatatccgtggggtgagtatgatattactcccaatatagaagggggaagtacaccctcctgtgatactgttcctaatatccaccgggggtgagaatgatattactcccaatatcgcaggaggtgtacatccctctgtcacattgttcgtaatgtttaacgggaaagataatattactcgaaatatcgttaataccctgtgtgtccacccccctgtgatataattagtaatatccagggggagaggaaggtgatattactccccatgtcacggggggtgtccaccctcctgtgatatgatccgtaatatccagggtgggagaggggggcgatattactctcaatgtcgcggggggtgtccacccccctgtgatatggtttgtaatatccgggggcggagaggggcatgatattactctcaatatcttgcgcaccgtttttgtacaccctctctgatatagtttgcaatatccaggaagggagaggatgatattactccccatatcgcagggggtgtgcacctctctgtgacagcgtttgtattatcggtggggaagtgtatgatataattccctatatcgcagaaggtgtacacgcccttgtgatattgttcataatatccagttggagaggggatgatattactccccatttgcagggggcggacacccttctgtgatattgttcgtactatccgggaggtggggagaggatgatattactcttcatattgcagggagtgtacacccccctatgatatttttattctacccaaggggggtagaggttgatattactccccatgactcaggggtgtacacccccctgtgatattttttgtaatgtccaaggtggggcagaggatattacttcccatgtctgatagggtgtacacgcctttgtgatattgtttgtaatatccagagtgggagaggatgatattactttccatattgtaggaagtgtacacccccttgtcatattgtttgtaatatccagcgtggagaggatgatattacttcccatatcagagggggtgtccacccagttgtgataatgtttgcaatatacagggggtgagagaatgatattacatcccatatcacatggggtgtacacccccttgtggtattgtttgtaacatctggaagggagaggataatattactcgcaatatcgcagggggtgtacaccccttgtgatattgcttgtagtatctgttggggagaggatgttattcctcgcaatatctcagtgcgtatactcactggaatattagaagtaatatcctcgggagatattactcctaatttcacagtgggtgtacaccctgtgatattatttgtaatatccttggggtatgttactcctcatgtgacagcgggtgtacatcctgtgatattatttgtatcatttttagggggtgttactcctaatgtacagggggtgttcaccctgggatattattggtaatatcctagagatatgttaccgtaatgtcacaggcagtgtacacttagtgatactattcgtaataccctaggaggatgttactcctaatgtcgctgtgggtgtacactctgtgataatattcgtaatatcctaagagtatgttattcctaatgtcacagcgtgatattattcccaatatccaaggagaatgctactcctaatgtcacagggggtgtaaaccctgtaatagtatttgtaatattttagggggatgttacttgtaatgacacagggggtgtacaccctgtgatattattcataatgtcttagaggcatattactcttaatgtcacaaaagatatacacccttttatattcttcctaatatcctaggggcatgttactcctaatgacacagggtgtgtacactccatgatattattcataatatcctaggggggtgttatttttaatgtcataggtgatgtacaccctgtgatattattcataatattctagggagatattactttaatgtcacagaaggtgtacacccagtgatatgatttgtaatattctagggagatgctactcctaatatcactgtgcatgtatactgtgtgatattatttgtaacatcctagaaagatataacacctaatatcactgtgggagcacatcctgtgatattttttgtaatatcctagaaagctattactcctaatatcacagttggtttacaccctgtgatattaaaagaaatatcctaagtagatacgactcctaatatcacacttggtgtacactctgtgatataattcctaatatcctagggagacattactcctaatataacagtgggtgttcaccctgttatattatttgtaacatcataggaagatattactcctaatatcatattggatgtacaccctctgatattatttgaaatatcctatgccttcatataaacttttgcttgctagatcagttccttgaggagagaacttcagctttaaacattctagtcccttcatggcacccagaggatacaggaaatgccccaggtgctcataagtgcccaatagtaggttcccctcatcagtgagcctggattcaggatgggggccaagaagtaactcagtctactacattccttgcctcagaacgagaacctttagggagatttgaatatttgaggtcacagggacatttctcatatggcagaatcctaactttcagaatttagagttccacagcagctttaaatgcctgcaacactaaatccattctttctttactttccacttaccagattttcctggacctgttttctcttctccagaatcccttcatagactcaaatgcttcagcaactccttaaaatgtttttaaaatattgacttcctaacgattaacagatgcagacaaagccacaagctgtgggtagaagaatataaatccaaatttaattctgtattaaagagcaaggctgcattgtaattctctaattctgcattgtgttgcaatgcttgacacaaatgaaggggttaccttctaaatacctgagtgaccgtgaaatctgagatcacttgggaccccatgtccatgacgagtttttaaaatgtgtaatcatataataatcacggtcatttatttggaattgactctgtgcttcacactgtgcagttctacataaatcattttctcttccaacaactctatgaggtaattgatcctaccttcattttacagatgatattaccaagactgagacactgagagaatggccttgagatgtgactgcagccattacacacactgtatagcccatgatggtgattatttaaacttgattttttttttttccccaaagactagtgttcctggcctgacacaggactgagcaaaggcagaaaggcagggggtagtcgaggcagtgctggaaatcagacagctgcaacaggctcactccttatgggagaggcagtgtcacaggaggttgtcaagttggaggctggcggttcatgtgtagcagaggggctgacgccacagcacagaggaaggaccacgtagtcatgcctaagaagcatggccagtggtggccaatgacaatcctggccaacgacatcagtctctctggagctgccttgaacaatcaccagctctcatggtggctcttgcccagcagtgactttaaggacacctctcatcatctggcaattagcaaaattttccagggtggattagttttctattgcttctataacacattaccacacacttagtagcttatgcaagactgatttattatcttacagatctagaggtcagaagtcccaaaatggttcttatgaactatgatcaaggtgtcagcagagctgtcttgtttctggaggctctaggagagcaccttttccagcttctagaggctggcctcattccttggatggtggccctgtccttcatctttaaagtcaacagctagcatcttccagtctctctctgagtctgcttccatcatcacactgccttctgtaagtgtgatcttcctgtctacctcttagaaggacactgtgattgctttgggcccacacagataactcaggatcattttgccatctgaaaatgatccataacataaccacatctacaaagttcctttttccaggtaaggtaaaacattcccagagactaagatgtgaccatctttggtggtggtaggaggggacagaggcattattctgactaccacacaagggaagtagcaagagaccagtgtgtaatttatcctggagctggcccttctgctctatggaagcatcacggtacagtggggaggccataggctttggagccaggcaagttgaggtttcaattcccagttctactatatgtggtcttgagcaagttacttaagtcctcaacttctttgagtttcagtgtatgcttgtggggatgaccgtagtaatgactagggttattatatcacttggaggtaacatatgcaaagcgcctggtacattcttaataaatgaggggctatcatcactgtcactctgatgttgtttcagcaagttctgtgagtgtggtgatggaaatgctaaatccatgttctgtgaagcagaatgcctccttgctgggcctcagtggcaatgccaactgtagccttctttgccaaaggacaggcaggtagagctgcaggagggagaaagcaagctgttgtacaaagctcaagatatagctgggttctgtttgatcatcagttagcaggtttatgctcatccacttgttggcagtttctactcagatggccaattcctggctttggtcccactgaggactccgtggacagtgctgccagctcaggtccctactcctccccacctaattctgacaaggtgttctcatgctccttggaaacatcaagaccagactaagcagacagctaattgcaaattcattttccctgcatgaaacaaatggaaaaagccaacagcttacacaaagtcctttgaattgaagttgcaaatgcttctcacagaagtccacatgcgattaaaaaaccataggcctgagagactgggcatcagtcatcatttcttccattttacagatggggatgtctgggagtcacgcttcatattgctggaacaagagacaagcctaatctcctcacttcttgtgtggcctcctaaatctaaattgggctggggtatttcaaaggttgaggttcagcctgatctttttcaattttttcttgcatttaaaaacagagccacaaaggggtgatatccagcccctcaaagtggtaagttatcctatgactcagcctgattgtgaagtgcaaccctctagagtaaacccaacattactgctgccaatacgaccaccacccttcatccagagaagtacatgacaagagaaatgtgagtgatacaaccgtaatgctctgagtacaggggtggggagctgcagtcagtaaggagaatggtagggtacaggagtgaaggggtcagtgcatgcagggtaaaatgacattaggagagattacgctcttataattacatagaggactacctgcctatttaagcaacatcaccctatgactaaattcatttatttaaaatccattcatcatctattcattcatgaatcaacttttcaagtcagcattcattgaacaccttttatatatgccaggcactgcattagactctgggtatttaaggatgagcaagatacccattgctatgatttcaatgtggtttgtttgtcaccaacaaatctaatgttgaaatttgatcccagtgttggaaatggggcctaatgagaggtatttgggtcatggagtagaatccctcatgaatagattgatgccctctcttgggtgtgagtgagttcttactctactagttcccatgagagctgcttgttaaaaagagtcccccacccatctcttgcttcctctctcaccacgtgatctccacatacaccagctccctttcaccttctgccatgagtggaagcagcctggggccttcgccaggtgcaaatgcccaatcttgaactttccagccatcagaatcatgagccaagtaaggccttttcctttataaatcacccagcttcaggtattcctttatagcaacacaaaacaaactaagtcacccattgtgccctagagaaagagactcagtacatcagtgatgtggcagatacagaaccagggtatctaatctagcttcatccccgagcagaaatgtcttcacatatactagtgagtttctatatctttgttaacctcactcttaccatctggaatgctctccctcacaacttctctgtgataaaaccaccttcatccttaagggcctggcacaaggcctccttctccttaaaacctccccaagctggctctcaaaactattctctcatgcctctgtgttcccacaatgccttgcacctgaaatttaggctctatcagggctgatttccatgggaactgtggtttacaactgtctcctagatcaaacccacagtgtcttaagaacagagtgtcataaggacagggccttgccttcatcatctttgtagagtgtacatactgaggaagggatcaataaatgaatggcaagatgctttactcttctcccaactttctttcaggggtataacaaccatcctccttctgagaccctagtatacaccaagctatgaaaataaaagataagccaggcacagtggctcatgcctgtaatcccagcactttgagaggccaaggctggagaattgcttgagcccaggagtttgagatcagcctgggcaacatagtgagaccctgtctctacaaaaaataaaataagttgagtgtgctggcaagtgcttatagtcccagctacttgggaggttgaagaaggagggtcgcttgagcccaggaggctaaggctgcagtgagctgaggttgtgccactgcactccagccagtgacagagtgagaccctacctcaaaaaaaaaaaaaaaaatacaacagaggattttgtaatgtgagtggaggtatggaaaagaagtgaaggccactgaagcacaacttgaaagaatatgctaggaggctactcgcctcggcccctcttcacctcagggaccccactacagctccacaacacataatgaatgataattcaagccaaaggccaaggaggaaaaaaaagtgaagcctaggggacatgggagcgaaaggctgagcaaaggcatttgagaccacaaggagctgtgggagaggacaggagaggctcccaagagaccctcagagcattcatgagcatgaaggacaaaggctgagcacaccctgtgaactcaatggagtgaaagaagcactgaccattctctagtcaacatgagactttggtgggttccttgagtgagaaagagaaaactgttcttcatctccttctgggttccatgtggtatgctggctgaacaatagcaagtatggatgatggaggctgcactgatccacactcagtggttaagagcagggaaagaggttataaatgttgttgaaagagcaaaggaatgacacattcatttatgtaagggggcttgaccgatattaggaggaacaagggaactcctagccccacaaggcactgggtgactttttattatagggaccccagacattgcaaagactccttcccagtctccctttgaccctgtgtagccaagaaaatgcccttgagcaccatctaatttaggtcattgcatgccatgggattccttgcagcctgtcacatcttactctgggaggagtggcaaggaagttagttgtctggatctaactagccctagagaggcagcttgcatagagggaagcaaagcactttggaatcagaacacttgggttgaaatctttctctgtcacttcccaactcagattctgtataaatttctgtttgtttttgagacagtgtgtcaccctgtcacccaggctgaagtgcagtagtgcgatcacggctcactgcagcctcaacctcccaggctcaggtgatcctcccacctcagccttctgagtagctgggactacagacttgcaccaccatgcccagctaaccttttgtattttttgtagagatagagttttgccatgttgcccgggctgctctaaaagtcctggagtcaagcgatctgcctgcctcagcctcccaaagtgccactgctccctgccaattttggataagtttttaatgactctgaaattcatttggagtgaaaaacagacataatgtcagctatgcaaatgactgttgtgagaagaaaagtaggtagacaaacataacagatttgacagaacatcgtttggaatgtagtcagtatttaataaatggcagataataacatgagggagactaaataccatgatgtatctagaaagcagcagccatgatacatgaagttcacagaagtcattttctggttcacatttcatccacatctacattcctttatcaaacatcaactgggcacctatcaagggttagacactattttaggagcagaggatatagctttgaatgagacagacatgggccccgccttcaagttgctccgagcctaatgagagaggcaaacaatcactgaaatctgccatggtaagtactagaaatggcattgttcccagggcaccaacgagaaagggcttgactgtttggggaaatgggaagaggagagaggctcaaaggagttaaatgatgtgtccaaggttacagagctggattaacttctgcaatgcctctcaaacgtgatggtttagctgcctcatcatgcatcatagcatcatagtgctcaccaccaccaactgcaattgtcccaccaggagatggagcccaggaatcttccagatactcacgcagcacctctcagattggtcactgtgaaataagcaccgtgtctcctagattatgagcactttgagggcaagagctacatatctttcagagcccaacacagggtttgaaacacagtacgtcgtcagtaaatattgaatactgaattaataagtgagtggtactcacagagtttaactgatttgcacaagattacttggctaataagcagcagggctggtgcagatacaagttctctgactctctctttcaacactgagtaaagggaaaaaatgaacaaccagtgaatgactccgcctggcctggaagagaaaagattcaaatgatctttttttccccaaatcgttttcacagattatgatatggctccatctgaccagcagagggcaggcttggatggaactagcatcccaggccctctgaccagagtcatcatctgtgccttggcgctacagagatggtgattttttttttttaagggaggggaaaaaacaacaacaaaacctaccagagctgaaagtcttttccaaattatcccacctatgtcaacatcctgtcgtatttattggatggttggatctggatagaaatagggcctcgtactgtgtttagttccctggatccctcgtaacctatttccttttatcagcccaaaagtagctttaatctattctcctttggcagagatgggggtgagctagaacaggcatggaggggaggggtagacaaataagtcaggaaaagcttctgcttagatggtaacatttactttttgtcaaatttaaaacatttttgacctttatattttcaaaagcgtttttcaatccttttcatactcttcagggattccaattacatataccttatatcacctgaaattgtcccacaggtcgatatgattctgtttatttatcaatcttcctttcatctgtgcatcaattttttgtagtttcttttgatttgtcttcaagtttattacccctttcttctgcagtgtccaatcttctctttaacccatccagtaaattgttcatttccagtcttgtatttttcagttctacaattgtcatttggtttttatagttttaattgttgagctaaaattcctaatctgcaatcattctgtccacctttctttcaaattcttaaacacatttataatagttgttttaaagtctttgtctgctaactcctacatccatgtcatctctgggactatttatattgacaatttttttcctgattatgaattacattttctagcttttttcatatctagtaattttttattatacactggaccagctgaattggagcgcttagactatattttcctttgaagagcatggagttttattttagcacgcacttaagctactagcagatcatcttgatcctactgaggcttggttttatgcctttttagggtgggtgtagagttgcccttacttcaggcaatgatccttaattctaaaatgtggtctttttaacatctcagttaaattctctgagttttcgatgggatttcttcactttaaatggttggaatgtcaacatctccaagcactgtgtgacctctggaatcattgttcagttctcagctcaccaggaactcttctcttttaggccttgtgtagtcttaccctgcatatatgcagcttagttttcaaagacccaatgggttctctctgcatatttttaaagttcctgctctgtacagtattctcttctccagtaccctgtcccacaaattctggccacctcagtagccccaaactctatttctatttcttccactcagcaaaacatcagagaactgcaatctcttcccaaatcattttgtaagtttctcttctgttaagcctcacaatcgtgtgacttctaacctccaatgactgacaacaattgcctcatatattttattccattttgttgtcattgatagtgggaggagaactctgatattcataactctacattgggagatatagaaagtcaggaggtaacatttaagctgagactcataagatgacaagaagccaactatgcagaaagccacaggaataacatgttcaggcagaagggtcaacatgtacacaggccagatagcaaagcttgctatatttctctccagagaaaatatgtatatatgtgtgactgtatttgtgtgcacacataggttggtaaacatctatgtaactaaagctatctcaaatggcataatagtaaaagcatgggctctggaatcaaacatcccaggggcaaatcctgccacttacaattagcagtaaggggtgttcagcaattcacttaactcttggtttcaactctttcttgtgtcaaatgaggcttgttacatacatgcagcaggactctcgtggggattaaatgtgataatgtatgttaagtatctagcaagataatggaataaatagtatataatgtgttattatttcctcttctgtaagtttttaaataatgttcaaagagtgaaatataatgtataaaatatggggcaatgtataaaatacagaaactattttccaaatataaataccacttttctgagttctttaaagttcttgaatatcaagttattcaactaggaacaaaggaaagtttcacacctatcccacacttaacacgttcctgattccaacattctcttatttgggttatttataaacatatccgtactctgcccattcctccaccctcaggtcagactgttaaggtcatttgagtgcagagacaagttttatttatatttgtctctcttacagacagtggcccagcatctagcacatagtatgttttttcaaacattatgaatttttcttcaaaggagtaaatagacttaatttttcatacaagaaaataaaatttggagttatgcatataccacaccaaagcaatctgttataatgatgaaaacccaattatcccattgtgattctacttaatactgaacaacccaccaggagtagtagaaagaaatgggaaaacagagacctggtttcaaaacctagctccctcctatttactaaatgaccttgagtaagttgcttaatagcctgaatttcagtttccttatctatgacaaagggataataactacctcatggggtctgttataaagattattaagaaataatatatctaaagactctaccacagagcatccatgctacattgtaggaactcagttctcatcattcaatggactcaatcaactattaattaactctgaatttttatgtacaacagtaagtctggctgatcctccactgtatttcaggggctatggtggacacccacctatgatattgtctatccaaccccctctgtccatttgagaatagttcttctttcaattgcaaccttgtgatttgcacacacaggaaattatatatatacatatatatacacacacacacacacacagatatatgtatatatatatacacacacacacatatatatgtatatatatatacacacacatatatatacatatatatatattttttttctttttgagatggagtttcactctgttatccaggctggagtacagtggtgcaatctcagctcaatacaacttctgcctcccaggttcaagtgactctcctgcctcagcctcctacaggcatgcaccaccatgcccagctcatttgtgtgtgtgtttttagtagagtcggggttttcctatgttggccaggctggtctcgaactcctgaactcaagcgatcctcccacctcagcctcccaaagtgttgggattgtaggcatgagccaccgtgcccagcctatattcttaaagattgtacccctggccatagctgattggtccagagatgggcatctaacccatgcaaggccactcagagcctttccctcaatttttcaaactcaaagtaagtaaacacctcactgatggtgaatgttgcaagatgtgaaatttgtgagttttgacaaccatgttccactatcagatggaggaagccaatctgtagagcaagagaatgaacggacggaacatgagaggcataaaagagaaccagagagagggagatgtggaagcatttgagttcctgacactaagttgcatcagagctcttcctgtgatttagttactcagactttcattcatgtgaagttcctgtgttattctgagtcctatgagcagttctgaggtgagattagaagtgcaagacatagattagggaaaatatctaatctatgtcttgtgatggaaaatgtgagagaaaatgtggatggagacagagaaggctgggagagccatcagaccaagaagagggtttaatctttgtgaagagaagaataaaggggaaaggttgggtggaagaatcttgggctgcagtgcagttcgaaggaagttcaccaagtccgatggagaatccttgagccagagtcacctatcagaggagtcctgtgtctcccaagaacagcccaatacagaatcttgccacattcactcaccggctgggagcaacttgtgtagggttgccagattacatataggacacgcagttaaatttgaatttgaatttcagataaatgatgaaacatttgttaatataaataggtcccaaatattgcatgggcatcctgtatttttatttgctaaatctgacacgcctaagcttgtgggagcacttgtattcagtgtaacacagtaagagatttgagtgcagcagctgggaccatccgccagtcatgctgtcataatcagggatctgtgaggcacagccccgtggccactacagtacaccttccagtagatttctcttcttccaaaactagtcggagtttacctttttcacttgcaatctaaagaattctgactgattgctacagttacctattgacttataacacacaattcccaactttgtagtgtaaaacaaaaactattttattatgcctgtgggttctgtgggtcatgaattgggatattttatagggaggatggcttatctctgctccacaatgtctgaggcctcatctgggatgcaaaaacagaggatgatacaagtggccgaagggctgagtcatctggaggcttcttcactggtatgtctggtgcctaggctggaaggacttgagggctgtgctcagttgagactgtgaaccagaatgccttcacatgtcttctccatgtggcatggaattcctcacaacatgactgcatcagggtagttggattttttccttagaggcttaggaccccaagcatgattgtttcagtaaataaggcaggaactgcatggtctttaatgtcttagcctcaaaagttacccagtctcacaactgctgtatcctactggtcaaagcaagcacaagccacctacattcaaggagaggggatctagaccccaccttatgatgagaaagaatttataggcatatttttaaagtgccacaattagccgggtgtggtggcgggtgcctgtaatcccagctactcaggaggctgaggcaggagaatcacttgaacccgggaggtggaggttgcagtgagccaagatcatgcggttgcactccagcctgggcaacaagagcgaaactctgtctcaaaaatatatatataaaataaatgaaataaagtgccacattagttagttgaccaggctcagcacatgatttttaaaaatccctcttgcctcttaatgtctgtgaaagaccgtgctctggtaggaacgctgactctttcagaaagcaagaactcaaatgttttgtgagtctatggcataaagtcctttcctaacatctactcagagcatccttgggggtaccaacaagaccactaactttttctgcactctttcttgactaacaacccttcgattaaaaatttaagcaactgcgtaatatagaaggaacatcagaacaagtttattttctttacagacagagacctccaatcccatcaattattctctgtcatttggtgtaaagctgcagatagaggttacaacagctgtgaggatgtgcagaaggaaaatgagaacagccttttttatcttcagagactttgggcagaccaactatcattctcacaaccaactttctaaagacttttgacaatctggatatcagtaatagttgattgaaaagtacttcttcattgtatcatctgtgcaagaatccataattaaaaatataaaataaaacactgtgggctcctttatatggcagacatggatttaaattctaccttttctcccatttttgtctaggtagacgtgtacaagtcactctgcctttctgagacttattttccacacagtgcaatgcaattaataaccctgcctgaaagactgagtgtgagaattagaataataaatataaaataaagcacccagaagattgcatagtggcgggtgagatataaaaagaaatttcggagtaaacatcaccagatgcttgccatgtaccaaacaccatactagaaactgcaggggacacagggatgatcaaggcacagttcttgtcaccagaaataacatagttgattaaaggactagcctatctgctatgaaggaatcagcgagtatgaggctgagttccaagtaaggtgtgtcctagcattctctggctaaccattattgcctcagtttcctcatctgttatgatgagaataataataaccaccttgcctacctcacagggttattctgaatattacctaaatagtagggattaaagtccttggtaaatactaaaatattaaagtgtagtcttgcctcactaaccaaagtgtggcccatggaccaccagaattgacatcacctaggagctggttagaaatgcagactcttaggccccaccacagacctactgaatcagagtttattgtttaacaagactattcgtgattcctatgctcattaatgttggaaagacagtgatctatataacagttaacattgcaataaaaaaaaaaacgaagcaatttgattcatttcaaagcaacctatgggcccatgcaaaatgatctaataaaaattaaaagcctaatttctaagaaaaccaattagaaagacaagtgggcccctaaataggacaggctaaataggaggcattcctagaggttgtggaattttaaaaatgtgcttcagtctcaccactaatgtcaactgagtaaagagtctccatcataagaaagagttgtataacctgtcttctacctgcacggctgagccctggccaagcaggtcattttagccatctcaatgagcgaggcacttcatggtgcactgggcccactgtggcaactgcaatcaaatcaagatgggtaatgtgcagtataagtgtttagccctcacagtgcctcattcagccctctattatggctttatccattgtaccctattatctgtgttcaggtctgtctcctccactgcactgtgagctccttgggggtcaagggcaatgactgttttctctgtaatctctcaactctcagcacagtgctactgcaaaactgatgggaagatttagtgggggattaaagggaaagtccccattttggtcagacccaatgtggacaccttttcttcttacacggttcccgttcttctgatccccttctccgtacatgtctcaaaagctcttattcttcacctgtgcagtctttggattcattttaaacagaatttttattaacatatttttattgaggctttttctattttgaattattataacttttatatacactggaaggtaagggaggtgttcaactttattgtttgcatatggctatctagttgtctcagcactatttgttgaaaagactattctttgccaccactgaattgtcttggcactcttgtcagaaatcaatttactgtatatgaaactgcctcagttctattccatctgtctttatgtctatccttatgccagtgccatacagtcttgataactgtactgttttattgctttgaaatcaggaagtgtgaactctccaactttgtttgttttcaaaactcttttggctattcagggtcccttgcaattccatatgaattttaggatcaactttttcatttctgcaaaaaaaaaaaagaggtggggtggggggtgtgcaggtaggattttgataattattgcattgactctgtgggccattttatggagtattaccatgttgacaatattaagttttaacaattcttgaacacaggatgtctttccatttatttaaatttctttaaatttctttcagtaatgatttgtaatttttgatgtacacatttgcacctcttttttatattgtatcaaaattggaattgtactatatttgatattactgcatccaaaactaaaattgttttttaagtttcatttttgattgttcattggcaatatataaaaatacacttgagaaaaaaatttggatttctccctctccctccccctacccctccccctccctctccctcatctccgtctccctctccccacggtctccctctccctctctttccacggtctcccactgatgcccagccgaagctggactgtactgctgccatctcggctcactgcagcctccctgcctgattctcctgcctcagcctgccaagtgcctgcgattgcaggcgcgcgccgccacgcctgactgcttttcgtatttttttggtggagacggggtttcgctgtgttggctgggctggtctccagctcctaaccgcgagtgatccgccagcctcggcctcctgaggtgccaggattgcagacggagtctggttcactcagtgctcaatggggcccaggctggagtgcagtggcgtgatctcggctcgctacaacctccacctcccagccgcctgccttggcctcccaaagtgccgagattgcagcctctgcccggctgccaccccgtctgggaagtgaggagcgtctctgcctggccgcccatcgtctgggacgtgaggagccccactgcctggctacccagtctggaaagtgaggagcgtctctgcccggccaccatcccatctaggaagtgaggagcgcctcttccctgcggccatcccgtctaggaagtgaggagcgcctcttccctgcggccatcccatctaggaagtgaggagcgtctctgcccggccgccatcccgtctaggaagtgaggagcgtctctgcccggccgccatcccgtctaggaagtgaggagcgtctctgcccggccgccatcccgtctaggaagtgaggagcgtctctgcccggcagccatcccgtctaggaagtgaggagcgtctctgcccggccgccatcccgtctaggaagtgaggagcacctcttcccggccgccatcccgtctaggaagtgaggagcgcctcttcccggccgccatcccatctaggaagtgaggagcgtctctgcccggcggcccatcatctgagatgtggggagcgcctctgccccgccgccccgtctgggatgtgaggagcgcctctacccagctgcgaccccgtctgggaggtgaggagcgtctctgcccagccgccccgtctgagaagtgaggagaccctctgcctggcaaccgccccatatgagaagtgaggagcccctccgcccggcagccaccccgtctgggaagtgaggagtgtctctgcctggcagccaccccatccgggagggaggtgggggtcagcccccgccaggccagccgccccgtccgggagggaggtggggggatcagccccccacccggccagccgccccgtccgggagggaggtgggggggtcagccccccgcccggccagccgccccgtcagggaggtgaggggcgcctctgcccggccgcccctactgggaagtgaggagcccctctgcccggccagccgccccgtccgggaaggaggtgggggggtcagccccccacccggccagccgccccatccgggagggaggtgggggtgtcagccccccgcccggccagccgccccgtccgggagggaggtgggggggtcagccccctgcccggccagccgccccgtccgggagggaggtggggggggtcagccccccgcccggccagccgccccgtccgggaggtgaggggcgcctctgcccggccgcccctactgggaagtgaggagcccctctgcccggccaccaccccgtctgggaggtgtacccaacagctcattgagaacgggccatgatgacaatggcggttttgtggaatagaaaggggagaaaggcggggaaaggattgagaaatcggatggttgccgtgtctgtgtagaaagaggtagacacgggagacttttcattttgttctgtactaagaaaaattcttctgccttgtgatcctgttgatcggtgaccttacccccaaccctgtgctctctgaagcatgtgctgtgtccactcagggttaaatggattaagggcggtgtaagatgtgctttgttaaacagatgcttgaaggcagcatgctcattaagagtcatcaccactccctaatctcaagtacccagggacacaaacactgcggaaggccgcagggtcctctgcataggaaaaccagagacctttgttcacttgtttatctgctgaccctccctccactattgtcctatgaccctgccaaatccccctctgtgagaaacacccaagaatgatcaataaaaaaaataaaaaaaataaaaagataagccaaaaaaaaatacacttgacttttttttaactttaagttcctggatatatgtgcagaatgtgcaggtttgttacataggtatacatgtgccatggtgatttgctgcacctattaacccatcatctaggtttcaagccctgcattaggtatttgtcctaatgccctccctccccttgccctccacctaccaacaggccctggtgtgttgttcccctccctgtgtccatgtgttctcattgttcaactcccacttatgagtgagaacatgcagcatttggttttctgttcctgtgttagtttgctgagaatgatggtttccaccttcatccatgtccctgcaaaggacacgatctcattattttcttatggctgcagagtattatatggaaaaatactcttgatttttagatatcaatcttgcattcttcaaccttgcagaatttatttattagccctagtaatgtttttgtggattccataagattttctgtacgcaatatgatgtcatccattaacagagacagttttgcttcttcctttccaatctcgattatttgattgcttttttcattcataattaccctggctagaacctccagtataatgttgaatagacatagcaagatcagacattcttgtcttgttgcttatgttagggaaaaagctttcagtctttcacctattaagtaggatattaactgtgagtttttgctagatttcctcaggttgaggaagttccctctaactgttgaggaaacaggtagaagaaactttgttgagtgcttttttttttttttttatcatgaaatggtgttggtgtttgtcaaatgtttggcttttttttgttggttttttcttttttttgcatctattgaggtgatcatgtagggtttttctctgtattctattaatatggtgcatcacgttgattaatttgcatatattgaaacaaacctgcattcctgagataactcccacttagtcttggtgtatattttttttaaaatatatggctgaattcagtttgctagtattttgttgaagattttgcacctacattcataagagatactgctctatcatttccctttcttgtgatgtctttgcctgatttaaatatgctggcctcaaagaatgtgttagcctcatagaaagtgttccctcttctatttttttgaataatgtgtgaaaaattggtgttaattcttctttaaatgtttggtagaattcaccagtgaaatcatctggtcctggacttttctttgtgggaagttttctcattagtaattcaatctccttatttgttataggcctatgaagatttattatctcttcttgagtcaaattcattagtgtgtgtctttctagcaatttgtccatttcatctaggttatctaattttttggcatatatattaattgttcatagtattcccttgtaaacctttttatttttataacaccagtagtaatgtcccctctttcattccagacttaagtgatgtgaatcttctctcttttgttcatggtcagcccacttaaatgtttgtcaatttggttgatcatttcaaagaaccaagtttttatttcattgattttctctgttgttttactattctcgatttcattatttctgctccaatatttattatttacttacacctgccttgggattagtttgctcttctttttctagtttcttaaagtggaagcttaggttattaatttgaggtcttttttaacttttaaattcaggagtacatgtgcaggatgtgtaggtttgttagtaaatgcatgtcatgagggtttcttgtaccaattatttcatcacccaggtattaagtctagaacccattagttatttttcctgatcctctccctcctcccactctccaccttctgacaggccccagtgtgtgttgttcccctctatgtgtccatgtgttctcattatttagctcccacttgtaagcaaaaacatgtggtatttggttttctgtgcccgtgtcagtttgctaaggataatggcctccagctccatccatgtccctacgaagggcatgatctcgtttttttaatgcctgcatatatttcatggcgtaaatgtaccatattttatctagtctgtcattgacaggcatttaggttgattccatgtctttgctattgtgaatagtgctgcaatgaacatacatgtacatgtgtctttataatagaacacttcctatttctttgggtatatcctcagtaatgagagtgctgggtggaatggtatttctgaccttagttctttgaagaatcgccacattgtcttccacaatggttgaactaatttacactcctaccgacagtgtgtaagtgttcctttttctccacaacctcatcagcatctgttattttttcactttttaataatagacattctgactggtgtgagatggtatctcattgtggttttggtttgcatttctccaagggtcagtgatgttcagctttttttcatacactttttggccacatctgtatcttcttttaggaagtatctgttcatggcctttgcctactttttaatggtgttgtttgtttctttctggtaaatttgtttaagttccttatagatgctggatattagacctttgtcagatgcagagtttgcaaaaattttctcctattctgtagattgtctgtttactccgttgaaaaaagagtctgaatagccaaggcaatcctaagcaaaaagctggaggcatcatgctactcgacttcaaaccatactacagggatacagtaaccaaaacagcatggtactggtacaaaaacagacacataggccaatggaacagaatagagaacccagaaataagaccacacacctacaactatctgatttttgacaaacctgagaaaaacaagcaatggggaaaggattccctattcagtaaatggtgctggaataactggatagccatatgcagaaaattgaaactggactccttctttacactatatacaaaaattaactcaagatggattaaagacttaaatgtaaaaccccaaactataaaaaccctggaagacaacctaggcaataccattcaggatgtgggcatgggcaaagatttcatgatgaagacgccaaaagcaaattcaataaaagcaaaaatagatgaatgggatctaattaaactaaagagcttctgcacagaaaaggacttaatctatttttaaatatacgtgtttacctctataatttccctccaagcattgcttttgtgtatcctatatgttttggtatgttgtgttttcattttcattcatttcaaagtgttttctaatttcccttgtgatttttctctttaatccactggtttttaggagtgtgttgtttgatttctacatatttatgaattgtaagcattagtatgcttcctaagcacctcaaatttagcagcccaaaatcgaactaacttttttatctcttctacctcaccttgcttttcatcctatcttccttagctttatgatatgcaccattatttacccacttcccaagacagaaaccctggagatatcccatatcattaatatttaattctctcttatggctatagccagtaaatcatctagtcttattgcctctccatccccttcctccccagtttttggcatgcatcatgtcctctgtctttaccaacactactctatactggctactctcatcatctctctccttgactgttacatctatcgccatttggcctatagtttttgacccttccaattcaccccccacattgccaacaaaatattcttgcactcatatttgtttttgttttgttttgttttgagacagagtctcactctgtcacccaggctggaatgcagtggtgcgatctcggctcactgccacctccacctcctgggttcaagtgattctcctgcctcagcctcccaagtagctgggattacaggcacgtgccaccaaactcaactaatttttgtatttttagtagagacggggtttctccatgctggccaagctggtctcgaactcctgacctcaggtgatctgcccccaacctggcctcccaaagtgctgggattacaggcgtaagccaccacacccagtcttgcactcatatttgattatatgattttctttctcaaaaccttattacccatggaacaatctccaaattgctttgcataacacataagccttcaagatacggccactgtctccctaacctgcctcttgtcccaccattcccctacactatcatatcttactctgttcatccagaaaatgcatatattattgaacatgccatgtgtcattcatgctaccatgaccttgaatggtgttgccttagctcctaggtatctcccacaaaacttggcatccctaaaattgacatctttcatgtcagctgaaaaactgccacctctggaaattatgccatttccccaaacaaatttaggtgtttctcctatactcacaatatatttgtctctgtcttcagtaaagcaattattttattatattgtgctcattggaatatttcaagaaaacagcttcttgaagacaggacatttattttatttatctctacatttccagtgctacagtaaagtttggcctaaaataagtattcggtgattaaatctccattgttcagtaccctaccacatactatataacatcattaaatttctatcaccatcagtgactcaagaatgttactgatttaactatatcatcccaagaacttcataggcaaaattagcaaaggaaagcacagaaacctgaagccctttcccggcactgtgatggaataatattatgcacaccatatgactctctttgtcaaattttctgattccataaattagaggcgaagtcccatattcactcctatgatggttaactttgttaacttggctaggacacagtgcccagatatttggccaaacattattctacatatttctatgagggtatttggatgagattaacatttgaatcagtggactgtgagtaaacggattaccctccataatgtgtgtgggcttcatccagtcagttgaaggtcttaacagaacagactgatctcccttgagcaaaaagcaattctgccagcaggcatccttcagacttgaactgcaacattagttcttccctgtgcctccagcctgctgatctatcccgcagatttttgacttgccaggcttcatattcataatcacctaaaccaattgtttaaaatctctctttctctctccctctctctttataaattcacacatcctatcttattggtcctgttgctctggagaaccctgactaatacactgtctaggaatcttttccattggcatgggcattaggtctttcattttaaaagaagaattcagaaaatatgtccatcaacttctctaaaggctgagcaatttattatgttcttgcttgcaagatggcaagtgtgggctatctggtagttaatgatgatgatgatgatggtgatagcaggtaacatttaggaagtgattactctctgacaagcattgtgctaagtgttttatatgttatctcacataatttgtgcaacagaccagccatgatggctaacatctgtaatcccagcactttgggaagctgaggcaggagaattgcttgagtccaggagattgaggccagcctggacaacagtgagaccccatctctaataataataataatttgtgcaatgggtgcttttaggaatatagccccacagttgtcagccctttccaaaaattgccctcagctggagagagctacctcatttgaggccacactcccttcagggaaaggacagcctgcttcccatgatggatcatttgtaggagtataaagacctcagctccctccctgcactgcaacacaactctgaagtgctctcccagctttaaactgtcctgtgaagttgcgtgaagcctctgttaaaactgtactgcagctcagtttctctgtctgcccaaatctgcttcttttgctccctcttcacaggtgttaatcctaaagcactccctaataaacttcctgcatattaatctgcatcttagaatttgtctctcagaggacccaacctgcaacaatcctgttatgaagattaaatgtaatagtccccataaagtggacttgcagccaggtgcggtggctcatgcctgtaatcccaatactttgggaggccgaggtgggcagatcacttgaggtcaaaagtttgagaccagcctggccaacatggcaaaaccccatctttactaaaaatacaaaaattagccaggcatggtggtgggcacctgtaatcccagctactggggaggctgaggcaggagaattgcttgaacccgggaggcagaagttgaacccaggagctgagatcgcgccactgccctccagcatgggcaataagagtgagactccatctaaaaaaataaataaataaaaaagtggactttcccaagacctaacattaagtaagtagtcaaacgatggaattattactatgtgccacctaaaaaggtaggaactattattatccccagtttatagatgaagaaattggactttaaggaggttaaataattcacccaagatcactatatagcagaactcaaggtagatatcaaatacagatatgactgactccagagctgtgctcgttcttattacacaatcctggcttcttttaaaaattattctggagacttttcccaaatgcaatatctggaggaaggtacatcgcaggtggggactgggttcttgaggcaatgtttggtagcagcttgggatggtagagaattatagtcaaatgccaactctgcccaagatgtgaaatgggaaatgggaaatgaccagaaggggtcaaaaaaacagtcaggaaaaaaacaaaacaaaacaaaaaaaaaaaaacagaagcatgaacgtcccagcaaaaaagccaggactatctcaggagggaaatttcacagtgaatgtgagggaatagatgagaagattcagcaaatattccctgtgagcacatggaacacccctttacggaagcactttaaaaagtcaaatagtcctgatgcccactgtgaaagaatattataactgtcccaggaatcacattcaattccacacataataattaccgtgcacctacgttatttctgtcttcgaggagctcatagtccggtgtactgggagtaggggtgggagggaagagaggcagacacacacactgaacaactaaataatattacacaatgttggctgggcgcagtggctcatgcctgtaaacccagcactttgggaggccgaggtgggcagatcacctgaggtcaggcgttcgagaccagcctgcccaacacagtgaaaatgtgtctctactaaaaatacaaaatttagccgtgtgtggtggcgggcgcctgtaatcccagctactcgggaggctgaggcaggataattgcttgaatctgggaggcagaggttacagtgcaccaagattgcgccattgcactccagcctaggtaacaagagtgaaactctgtctcaaaaaaaaaaacaaaaacaaaaacacacacacacaatgttactgagcatcaagttggttttttttaaaaaaaaacaaaacaaaacaaaacctaagctgccacataaggcatggttaattctgctcaggaagaccctagaaggctttacaggggaggcaacatttgaacaggaccttgaaagataacaaacctctatgcagtcaaggggaattttaaaagactagactattttctaagaggaagaaagaacacatgctattgtttgcttttctccagagtgtagggagtactccataaggaacaatcactttattgtcttataataaatcgtggacacttggtatttgccatatttcaacaactgggggtaaatcctctaaggagaatcactctaaatccaagcacttcaccctctgaaaggcttgtcatggggcaaaagaaatggtcctttgaattcacatgtcatacaatccccgccagaaaaacatgtgtatggggaaggcagcctgtgttcggtggagttacatgtaagaaacagatgttttgctgtattctgagagactgttggtcattcctgagaaattgttgagagattgcatgatcatttctgagccatgtctcctaagacttaaaggagagccccatctgtaaatcctagtagcaggcatttgtgtctaaaccacaggaattctatcttcaggttccaacactggggtgtttgaaactgagaaggtaacttcatgctgatagcacagttaccaaccagatgcttcaaagctggaggatccaactgaattgcttcaaaagttttctggttcctagcgctgcctagcagatggcaagtttgcccctgggaacttgctgccggggtgaagtaatgtctttttgcagttactgtctcattgtttttaatgagtgttgatgtgatgcacaaatgcaccttatagagccctgatcactcatggtggggatgtgcctgttcctaatccttgggaggggcagttttaggaaatgacaaggaagtgaaaatgattctttctgcccatctctgctaacaactagcagtggttaagcagcctttgatgagtcctttggttactcaaacaaacctggtatgtagagcaggcactgccagagcctcatggcctttttgtacgggagtggtgtacagttcagcagataggcacagcaaactcctcttctgccattcagatcagggacctctgaaatccacagatggggcaatttgggccctgtcttagtctgttcctatggcagtaacaaaatacctgagactgggtcatttataaagaacagaaatatatttcttatagttctggaggctggaagtccaaaatcaaggcattagcaggtttggtgtcttgcaagaatgtggtctctgcatccaaaatggtgctgtgttgctgcatcttccagagggcatgctgtattcccacaaggtggaaggaatggaaggagcaaaaaagggactgaatgcactccatcaagtctttttataagggtgatcccatccatgaggcagagccttcgtggcctaatcagctcctaaaggccacacctcttgatactgttgcattgtggattatggttcaacatgaattctggagggacataaacattcaaaccatcacagatccctcgtgcctagaactctgggggaagaggctgaacactcagcttcacctgtcactccgagacttatccatcagaaatgtcaaatcctgaatatgaccattcagtaacagaaatctcccttcccttctttctctgatgtgcagtagttctgcctgttagaatcatctggagagcttgttaaaaataccaatgtcaggagctcgaccctagagattcaaatttaactgatctggtgtgggacctggaaatcctctattttttaaaagttccccagttgaggccaggtgcggtggctcacgcctgagtcccagcactttgggaagccgaggcgtgtggatcacttgaggtcaggagttcgagaccagcctggccaacatggtgaaactccatctctactaaaaatacaaaaaaaattagccaggtgtggtggtgcacacctgtaatcctagctactcagaggctgaggcatgagaatcctttgaacctgggaggcggacatcgcagtgagctgagatcatgccactgcactccagcctggacaacagagtgagattccatctccaaaaaaaaaaaatttccccagttgagtctaatgggcagctaacattaagaagcattgccctggaatctcatacctcagcataaagcatagaatttctagccatctttatgccagaacaaaagtttacatcagctgttgataacaccagtgaaaaaatatgattaataataattgcttaaattgtatccatgtagggtaaatgcacctgatagcaataacttaagcatacccttagactgaccctgtatggcagacacatctgaatgtgtgttccaaactagggaattcgggagtggccaacccagaaattattccttgtttatgaagaacatctgagcccctggcctgaaccatggaagtgaaacacgggctgtacacgggattgaggccctaagttttaggttaaatgaaggttgccaggtggaggtcattaggggaaggtgttaagtgaaaatgctatataaactgcatgctgtttgcaagtggttgcagtttcctgcttagcccaatgccactgggccatgtggttatgttgtccagcccaccaccactggactttctcttctgtgtgtaagcccttaataaaaccccttatcttctttgctgactcttggtctcttcttcagcctcttgaacctggtgctctccctattaaggttaatcagggttcagaacaacaaccagttagtaatttatagtttgccatcttcaaaatgccttttggttcggtgagataaagtggctaaccaggagtaagcaggtggtatgtgccagggcttggtctaaaacacctaattatttgagctcaactccttccactgttccacccccagctcctcaattgccaagcctgttttctgtaatcagactgagcctgtgagacatttacagccggctctccaccactggactgaagcagaacagcgaggtaattatctgaataattcaggtaatggcagtttattttccctaaattacctggataattacctcaagcctaataagatggagagaagccagagccacattctgatggttttattgccccctcagtaatgctttcttgtttaaaggtcctgacttaaagaaatcatttgttggagcttgtgtcttccttatttgccacagggtattccataaatcatctgggaaaggtaccagtgtgtaattatccaactcctgtgcctgttgaaagctcctccaggctgaggagcacagctatcctggattcctgatgtgttctctgagttttggggagtcattagctcaggtaatgaggtgacaaagaggaaatcttttgggtgttagatttttgtttctccttttctttttgtgttctttcccacatttcttaaactaaataaccaaacatttcgcactacgtctgctatggttttcctgtgtccccatccaaaatctcatcttgaattgtaatccccataatccccacgttacaagggaccaggtggaggtaattgaatcatgggggcagtttcccccatgctgttcttgtgctagtgagtgagttctcacgagatctgatggttttctaagtgtttggtagttcctcctgcgttcattctccttcctgctgccttgtgaataaggtgcgcttccccttcaccttccaccatgactggaagtttcctgaggcctccccagccatgccaaactgtgagttaattaaacctttttcctttataaatgacctagtctcaagcagttctttatagcagtgtgaaaacagactgatacaacatcctattttcctgtgctgaacttgatctgtaaaatagagcaccttgtccaagagacaagacccgggctttcacatcaagcctcatagccagaaactggggaacccaaagccaactaatgggacaggagcttccttgttctgctgctatcactatttgccttgttaaaatgaccaaatgtctcacaggaagaggtgtctatctctttccgaaagagaattcctcctctgggacacttggtcatctctctgtagccttacttcattgtcactccctctcttttctctctctgccatctttgctgtgcactggctccttccagataggattaagtcttctccatccctgtaagtagaaagtgaagaattgaatgagattgggcgggagctggccatggctgagagttgatggaatgacaatattaggagatggaaagaagaaaatagaggccagaaaatgcagccaagtcagatacaccagatcaatgcagcgatatggaagcaaagggagatgaagttccaaatacacatgatatgatggaaaaccatgtgtttggaattgaatactggctgctcagctctctagctgtgtgataatctttaaaactgacatattattaaaacccacctcctaaggctttataagattgaattatttgttgcatgtaaaattacttgaataaattttatacttattaattattaatattattattgccaaaaagggaaatgtagccagctttgttaaatgcttcctggaatcagagtgaaaaaggtactaggggtcttctagtcctatgtttgaaagttttgagacctcttctcataataagaaaaacaattcacaccgtgatcaagaatttacatatatatatgtagtgggttgaatattgtcccccaaaatttatgtctacactgacccttggaatgtggccttatctggaaatagggtctttgcagatataatttaggtaaagatcaagataagatcacaatgggttagagtggggcctaaatccaatggctgtgtccttagacagaaaagggcacagagagaagatgctgtgaagatgaaaacagagattgcagttatgctaacaccagccagggaatgccaggctaattcactaattcactagaagttagaagagtctagaaagcattctcccctagagctttcaaagagagcttagtcctgccacaccttgatttcagacttctggcctccagaagtatgagagaataaacttctaatgttctaagccacccagtttgtggtaatgtgttatggcagccctagtaaactaatacatataagtatctgaatccaaagcttcgcaaattatacttactgtgtgttatgcactatgataaatcctattaatgctggctgtaaaccactaaattgatttccgacccacttatttgttgtgactcatgattgggagaaacattgttctgctatgtctctcattaaggatgaatgatgactgagaaaaaaatctttggatttggtttaagagtcaacgctggtcctcatggaaataattaaggtaggatggcaggagctatctacttagcacagagatgtgatcattatagataggtagatagaaatagatggatagatatagatatatacatgcattgtatattttgtgcccaaaatagcagtggcttaaataaaagtatattcttcttgttaaaaattttttttaaataaaggtaaattatttactctcatacaaatataaaatgaatacacgtcaaagattttaactcattaactaatgaaggaaccagtaagatattactatcagctcaaaggagaatttaaagtaccccacttatagaggtcaatcaggaatactgaagtgaatttacaaatagatgtaaaactggctttttccaaggggcagaaatagagtgggagtaaaggggggaatcaattcactggacagaatttgtcttccgtttttgtttgtttgtttttgtttttgtttttgagatggaatctcactctgtcgcccaggctggagtgcagtggcacaatcttggctcactgcaacctccgcctcctggattcaagcaattctcctgcctcagcgtcccaagtagctgggattacagacatgtgccaccacgcctggctaatttttgtatttttgagatgaggtttcaccatgttgtccaagctggtctcaaactcctgacctcaagtgatctgcccgccttggcctctcaaagtgctgagattacaggcatgagccactgtgcccagccagaatttgtttgcatatggaaaagaaatcatctttgccctgctagcagttctctacaacttacagagttgtaaaatatttcaaagacaatgaatgttagaggtaacctggctgggtaagctactcagggcacccaagaatctttttgttgcccatttcaagaccctttgcaatttttcctggcactctcttatataatcacatgagagtaagtattctagaactcccatggcagctcccagtgtcaagggaccagtgccttccatcttattgcttctccatttctagggtgacaccttcatgtctggcaatgtagggaaggagaggtagtaggaacaggaagggaaaatcaagctgaagaaaggactaacctttaccggtcgttgtctttatcttcaaagctcacagtgcagatgccatcccctctatgcagccttgcctaatcaccatagctaaaatctctttctcccctaaactctcatgtcccttgatgtatgcccttcttccttatcactatttgtgtatatgtcttatctcttctgtaggctctaaggtatctcatttatgtttttaatgctcatagcttctagtacactgccctgcccaaaggtgacattttattcagttattaccttcctctctattgagctgtcttcaggacaaagccaaagaaaggatctagtatttttcctcccctttcaataacacagagagttaccagtactctttctttgatgacattacagtgagacttcagatcatgagtttgagaattctggcttttaagtcctattccattttgatatacagtaacatataaagatttaatcaaatataaggatttaatcaaataattaaacatctattctacccaggacagtatggcatattagaaagtgagacaaattttgaataccacagaccaaggtacagatcctggtcctgctactcactgacatatgtgaacttctgtgagtcacttaacttctctgggcttctgctttcaccttcactaaatgaggataataaatccagcttgcaaggttatgatgacatatgagcctattgtatacacaatgtctatcataaattcagtggcattcattaatattagaatactaaactgagaatatctggattttttactgtatttatcctttattttatccttttttttttttttttttttttgagatagggtctcactcttgcccaggctggagtacagtgatgtgatcttggctcactgcagccttgacctcttgggctcaagtgatcctcccacctcagcctcctaagtagctgggaccacaagcacatactaccatgcccagctaatttttatattttctatagagatggggtttcaccatgttgcccaggctgctctcgaactcctgggctcaagtgatcggcccactttggctgcccaaagtgccgggactacaggtgtgaaccaccgtgcctggcctgtattcaccttttttaaccaggtgttttgcactattgtgtagccacagctataattagcagaaggtaagtcaaattcatgtcaattacggccagatatgaagatgaattaacaaatgcatctgatcagtccatccaaaatttcagtcaaattatcaggaagtatataatttgtataacacaactaactgttcatctttctgtgaagtgtactcacttcacagtggggacaggcttatggcagtagctgtacaactttgaaaatctgcctttgtctcttatttattttgaaatgggggtctttttaaactccttaaaacttgaagtaagtctcagagaccccaactaaaactaccaattaagtttgcacaggaaattttattttccaaatgtaattacagggcagatatttcaggatgtatatatgtgatagtattttaataatttgttgagccttaaggtacagtatcaaatactgctcattcctaccagtttggaggggaggggtggaaaagatagggaagcagaatggaatgacttattcaactttccaattctttaatatagcattgacctttgtaaaaaaaaaaaaacacacatatacacatgcacataaacaaggactcccatttaccttattttccattttaaattatagtacccagtcattcgtctttgtcacgatccaccaaatagttttgtaagaacgtgtttcatacaagctctctttcagcatcagccaggaaggttaaggtttagatcctgcatgatagaaaccctttttgtaattctcccccaaacatctgttcagtcactcatcattaacatctgtcacccatttctgggctcaacccagacaaagctatgtttttctgtttatctaacgaactccatttcaaattgttaccaagtgattcctactcagactaatcttacacaaggattgagaagatgtcttcttggatcaaattcatcttccactaatgcagcgtctaccctgaagccttggcaaaagcccaatggctcagaggaagggaaattcttcataacatgctaacactttcctgcctggaaatgttacattgaaaacttctaattctctttaactttccagggttaacaaaacgccatcctatacatcttatacatatgtatatctttaacttcagcccatcatttaccctatacaagccccagcagggccgctttgcaaaccagctgaaataagaacataagaaatgattttttaaatacatggcccaattatttgcataaaatggctaataaatattggttcatttggaaaggcaatgcaatgtttaaaaatatgtagagagacctgaattgagatcttggaaaatcacctctaagtcaggtaaccttggatactttagttaatggccctgggccctcatctacttaaaggaaaaatggattccttatagaattaaagagttaaaagaactgttgcacataaagtgctttttttattttaaatttcttagacagagacagggcctcactatattgcccaggctggtctgaaactcctggcctcaagcaatcctcccaacttggcctactctcaacgtgctggaattacaggagtgagccaccatgcctggccaacataaagtacttgacacagtgcctggcacatagtaaacaactcagtttatagtaactctttatttatttacttatttaattgagatacaaagtcttgctctgtcactcaggttggagtgcagtggcataatcatatctcactgcagcctcaaactactgggctcaagtaatcctcctgcctcagcctcctgagtggctagaattataagcatgcacccctggctagtttttttttgtttgtttgttataaatactgggtcttgctgttgcccaggctagtttcaaactcctggcctcaagtgatcctcctgccctgggctttggttgctgggattatggtgtgagccaccacacctgaccagtttatggtaactcttgccatcatcatcttcaaagaagaaaaagagcagaatggttttaccttgctctttgcgctcagcatctcctttttcttatttctgtttaaccagtatttattgagagcctcttatgggctaaaaactgtgccaaataacatgaaagaggcaaattccttgtcctcaaggagctctccctggagaagatagatagatctagactctacttcgaatcagatgctagtaagtgctctcattttaaaagtaacattccccacagattacttgaggatgttttaacaccaaatctctgattttcttattagaaatctttaattggaggctcatcttacacagtaagtttaggaatttaaaccccagggcagatatttcatttcgatgagaacctaatggttataatctaggtcagtgtttataatgtcaatagtgcagtgaggaggagaagggttttcacctctatttccatggattttagaaacaatcatagtgaagaaggcccctaaaactgaaccagatgggacaagtgaattattataacttatttatttccttcaataaatatagtataaaaagtatttcagaaagctcccataacccattagagtctatttgatatataaggatgctaaatattaatgttgatattttttgttgaggatcagaatgccaaggactcattttctgttgaatgtagtcaataaggaaggagtctctttgagaattccattatgaccatagctatttgtcactttcctcattgtctggggaaaggacaaatgaagcggagcacctttcagagctacagttctctgctgttgttccttcatgggtccctgtccttgggacatatgtcttgtgaataaaatatgtgtcacactgaagatgtgataagtgtgctgagaccacacaaagaaactgactccatcagcagagggtgatggggtgagcagaggctttccaggcagagggaattgcatgcggtgtgcatatctcttctctgaaccttcatttcctggcctctacatggagaaaacaaggcacacctctctgggtgcccagaagcacttacatatattgtctggtagtcatgggcactcatctatgttaatttgtttgtggcacagagttactggactaggtagtgatcagaaaccaagcccaggtattctgagcactaggtcatgcaggttccagggcatcactctacttccaggcacacccagaagacaaagtgtatgtgcaagtctcagctgacctgccaccatgttcatagggtaaagttgggaagtatttgtcccacaaccttcaaaccccacctgcttcaacaaaccctggcctggccagcatgcattcctgtgctgatcccttccccaaccccacaccccactcatggtgcactgctaggggagaatcaagctaagtcttcacaagtcaagaaaaaaatactaccctggccaggcgtggcttctcacacctgtaataccagaactttgggaggctgaagggggcagattgcataagctaaggagtttgagaccagcctgggcaatatggcaaaaccccatctctacaaaacatacaaaaattagccaggtatggcagctcgcacctgtagtcccagctacttggggggcagaggcgagaggatcacctgagactgggaggttgaggcagcagtgagttgagatcatgctactgtactccagcctgggcaacaaagtgagaccccgtttcttttttttttttttgagacagagtctcgctctgtcacccaggctggcgtgcagtggcacgatcttggctcactgcaagctctgcctcccaggttcacaccattctcttgcctaagcctcccaagtagctgggactacagatgcccgccaccatgcctggctaatttttttctatttttcagtagagacagggtttcaccatgttagccaggatggtctcgatcgcctgacctcgtgatccacctgcctcggcctcccaaagtgctgggattacaggcatgagccaccaagtccggccgcgagaccccatttcttaaaaaaaaaaaaaatactaccccaagggaggcctcagccatgaagtaaattgggaagagaaacacataagtgacaagtgacactgaaaaggctagatttttaaaagatgtttttagttgtctttaaaaaaaaaaatccaaaggcaaatctgataaccaaagaacgcatggtctatgatggagggaagtaggaaattgagttagatgagggaaggagctgactaaatgcctctttgaaaatagagatgtttctgagtcaatggacctgaaggacatgtttcctgagatacttaatgccaaatgtgttcttttcacttaagactggtatcttgttctctaagttgttgagatcttcaatacttgatttattatttcctcctcaatgctttcctctcctctaattgtagacactttgcacttggtttcaaggtctgtaaactgcattctgcctcccaggcgggacatttggtacagggaggcaggaggaggaagcggcttgcatgtgcccgtatgctcaggctctgtgcccaccttgcaatatgcatttgatgactcaggctgtgtactgcttttcttaaatgcatatctgatccattctgcacacagaattcagagatattttgtaatgtaagcagatcatactacttttctgcttgccacctgcctgtgacttcccactgtactcagaatgaaatccacattctttaccaggtgctacagggccctgcatggtctggctctgagccacctcaccacgctcattttgtgccactcttccccaccatgactatgtcacacctgtgtttgcctctgacagtatataggcggcatcctcttcttttcagctcagagtctacacatatgctgctccctctccctggaatctctttctcagactctgcctggctagtacccactccttcaaatttcagcattattatctctctctctttttttttttttttttttttgagacggagtctcgctctgtcgcccaggctggagtgcagtgatgcgatctcggctcactgcaacctctgcctcccaggttcaagcgattctcctgcctcaacctcccaagtagctaggactacaggcacccaccaccacacctagctaacttttgtatttttagtagagatggggtttcaccatgttggccaggctggtctcgaactcctaacctcaggtggtccgcccacctcagcctcccaaagtgctgggattacaggcatgagcaaccatacccggcttatcatctctttcttaaagaggtcttccctgtctcccaatccaaattaggcccaccactattgtacattcataacagcctagtcttttccttattaacactttgttatttgtgaggttatttgccaaatgtctgacaccctacacctgatggagagtaaacctcatggggacattgaccaatatgcacctattttatctacattatataccaagaaccgaaaacagctcttgtcccagcagagggcatgataaatgtttagagaataaatgaatggctggcttgaacaaaactaccatcttttctattcctgctgtcggaactgaaagagtagaggtggcctgtatacctcatctcataacagaataccaaattattaaaagtgcctgaaaccaaattgaattacagtcaaaatggtaggttgactgtcttctgcttctagccaaggagatgctaagaagggaggtcactggtctaaaaagttataaaggactttgaggaaaagaaggtgcatttatcaaaaccagaaagcctctaattcaaagtctcttgagagggccgatcacctacatatatagtcatacagtcattcacataaatgccaaaatgtcagaatttaaagctggcatttggaagggaattagctgtacctccagagaaacccggaccctacagaccttgctcacatagtatagtattttccagcgttatcctgagaagcccagctgttcccataactaaagacaatttccagtcattcctttggttttccactaattatacattattatcataatggcatgtcaagccatggtcatttatgaaaaccagggtacttctgggggaaaatagataaaaaggaaactcatgtctctgtctctactgaaccaggcatgggtgatccttcaaggtagaaactgggtgttgctcatctttgcttacctggagcctagaatggtgctgagcacagagtagattgtcaattcatgtctactgaatgtctacatagatgatggatagatgggagtgtgtctaagcaatttgtggagttttctttcactgaaataaagttgacccttagaatattcatttaggaagattatgtacttataaactgagccacctgtgctcagaaactatagggacattctctacaacccctcccctaaaaccttatctatttgctcccaatttctactgctctatttagactcagcatgtcttctgacctttggcaatatctcccagctggagtcttctctatccttggactaggcattggtacttaatttttttctttcttaagacctgttattcagcttatctcattcttatctttggatgacctagataagggtcctcacccaagcttcggccacttcaggtgtacctggctttctgtcagaccaagacttctgaaacagattttaaagagagatgccctagaaattggataattggtgagctgccaccagataacagctaacaggcatgatatcatacatctagctatcaaactacttccagatgtggataactgaggagaaaagattagtgtacatgatgctactacctatgttttttctagaaagacagtttaaaaaaatccaaagcaagatgtaaacaacatgatatcaagacacagactggtgcttactttttctgctctctgctaattccacactgcttcattcagctactttatgttttcaagcctgaattgaaaatgtcttcccttcttcccaaggatcaaagatgaatataatcgtagttaagatcttggattgtggactctggaaggccagtgtggaaattctgagtctaccactaagtagcatgggcaagctatctaacctcttcaggccttagtgttctctccaaaatatgaaaaataacagcacagagggaaattgctcactggaatgtccaggaccttacctgtcctggatgaatgatatttccaacacttagatatcttcaaaagaacttttcctgctaccatttgatccaggtcttgcatcttctggatatatttcttccttctttccttcctacctttcttttttctttcccctccccactgccctgtgtttatctgtatgttcttacctactacatggattaagggatggatgtctagtgtcaatttccacaatcacagttaaaaggtataaaaaatatgatatccagcaaaatataaacaaacaataatcatcccagcttctgttttacaagctacaggtcacaaggtcactgcaatcatgcataatggttcataccccactagcgatgtatgggctgagcctctggcatgcccactggtcatttacaacccagccctatacagtaccacaacaccaagttgttccttaagtattgtaatttttaacatacaatctttttttttttttttttttgagacggagtctcgctctgttgcccaggctcgagtgcagtggtgtgatctcggctcactgcaacctccacctcctgggttcatgccattctcctgcctcagcctcctgagtagctgggactacaggtgcccaccaccactcctggctaatttttttgtatttttagtagagttggggtttcactgtgttagccaggatggtcttgatctcctgacctcatgatccacctgcctcggcctcccaaagtgctgggattacagacatgagccaccactcccggactacatataatcttttaaaatctttttgaacaattaaaatgcttacttccagacccctgggtaagtgacttatttattctacctccctcatgatcttgaagtgaggattaagatagataaagtgtgtaaaccacctggtgtatgacctggcataggcagggtaagcaataatttagaatgtgctgaaatagggctgcttgaattgatagcttttgcttctgaaggctttttctaatagcttcagagaaaaataaatctaaaaccttctcactatggctggaatgaggtaaatcagggatagcatataggtctgaacatgcacactcactctacaaacagtcacctggagtacaaataaagctgcagaaaagacttctgtgctcacttagcactggccactgtggacccaggttgaaggaatgacaacatgggtgctgtgtatttgctgtccttgctgttgtgataagcacatagggctgccagttagaaaacctggattttagtcctgccccacctagacacatcacctccagcaaatcacccaagtcgagactgatttcctcatctgcttccgtccccatcttgcatgttgtatcctagtaatcatgaactgcttgtggttctagcagtttagtcccttggctttcctttgcctggagtacccatcttatccttctaactcccacaagtcttacccttcagcttctagctcaagcagtgcctttcccaggaagcctttctcaactcccaggtggtgctatgtaccccaactctaaatacccgcccacctgagcattattcctctattctatgggctagcaaactttttctataaatgttcaatagtcaatactttaggctctgtaggccggatagcctctgtcacaactattacactaaactctgccattgtagcacaaaagcatctgtggacaacatataaataaatgagtaaagctgtgtcccagtaaaactttaccactgggccagatatggtggctcatgcctgtaatcccagaatcttgggagtctgaggcaggaggattgcttgaggccaaaagtttaagactagcctgagcaacatattgagatccatttccaccaaaaaaaaaaaaaaagttttaattagcagggcctggtggtgcatgcctgtagtcccagctacttgggaggctgagatgggaagatcctttgagcctgagtgttagaggctgcagtgagctatggttataccactgtacttcagtctgggggacagagttagaccctgtctcaaaacagcaacaaaacaaaaacaaaaaaacccatttattttcaaaaacagatgttgggcttgatctaccctatcaggtaacatgtcataccgaaatgatccatgtgcatatctttctctttcactagactgtgcgctaaaggcagagataggccttccttctctttgtacctctaatattcagcacatagtggctattcaataactgaagtaacaatgctggaaaattggaataataatctctttctggctattccacagggctatgggttttaagcatgataaagcatgtgaaagcccaggacagtgataaggcaccattcaaacgtatggtgctcttcctacggcacatcattgatactcttgctctagcctcttcaggaggtggagagtcatatatgaatctgttatttcccgccacaagcagacacaaaataaaatgccagctaaaaacctcactcctttcagattcaacttctaagaaatgaatcattaggtcatatgctgagttgaagcatattaaaccatccagaagtcctgaagctaccctgaaaggcataaaaagtctcacaatgtctgcctccctttctttaaggttttctttaacaaataccttcacacttttccagaaggtgtcaatatttacatctgctgagtttgctgtcaagcttaatagaaggcaggaatagacgtctgagtccccaaggtgtggacacagaactcagagaagtcccactcatctggggtttctgctcactatgcaatgctgctcttacctgaaaacatgacccctttgcaccaacccgctgtgaccaacacaacggtgaaaattctgtacagatgtgaacaaatggagtgaacaaagaaggtgaggatgaaagatgagatctcctgatcttgctggtgccctaggcccatccccactgatgacattcattcactcattcactcattcattcattcattcaacaattatcttgagagcctactccaagccaaattgtgctgagaattcattgcctttgtagagagaacaaggcaccacagggatttctcaggcgcactattgccttgcaggaagggccagggcctggcggggccggggggcgggggcaagaggaaagctaatacctctaatattgtctgccagtcagaaggccacaccgggattggaaagggaagggttcccgggccttctccacccttgtgcccaggaaaccaaacctcgcagctattgttttcatcgaaaccctaagccatgggctcggctgcggcctctcaaaggcccccaccagcgccaccctcagctcttcgcccaggatccccctgaggctgcgccctccgcctggtactcgctttcgcccagctgcccgcccctgcgccaccccggcgcaccttaggggctggaggctggctcggcgaggttgtagctgggaccgcgaggttgccccccatctaatcagccccgcagtgcctcgccaactccggaagatttcaaggagttgtgcctgatagtttgccacgaatctccaaatgctgaactaccagtttcctccataccctgcatttcccagaggtagagctgaggtccagggacagcactgctgcccaaaataacactgctggttagtggcacaatgaggcccaaacccaaggtcctctatcactagcactaatgacaacaaaagcaatgtctatttagggagcgcttgccatatgctaggccctgtgaacattttaggtacgttatttcattcattcttctcagccacaaccagagatggcatttgtatctctgtacaaattaaggcaccgagaaattaaacagtgcctgaacagcaataagcagtaagtagcagggagaggtttccatccattttacccggtgatagattccggctgatgtcagggaactcattctctgtcgtgtgcatacctggctgttaacaaactttggtatactttaagatgcttaaaaggaatgagctgcgttgtttttatttgtgtacatccaggggacagaataccattgctggcctaaactgggcccaattaatgatttttttggtcttgctattcacataaaacatgaataaaaacatcttgtagtgtatatacgtacatgtatatttttgtattgtatctactttttgttatatagattgactgatggataatgttggacatatgcctagaaagaaaaactgttcgctgtagcatcctcatgcataacactgaacctggcacattctaagtgtatgataaatgtttattgaacaaattaatgatttttttttcaatcaaaatgttagcagtggtgttagggaaattgtcattttaaaaatacttttctatagggaacttttttaaaattgtggtaagagcacttaacatgagatctatcctcttaacaattttttgtgtttttttgagacagggtatcactctgtcacccaggctagagcacactgtgccatcatggctccctgcagcctcttgggctctagcagtccccccatcttagcctcccgagtagctgagactgcaggtgtacaccaccacgcccagataatttttgtatttttcgtagagacagagtccctctgtgttgcccaggctggtctcaagctcttgggctgaagtgatccgcctgccttaacctcccaaaatgctgggatttcaggtgtgagccaccacgctggccttaacaaattttcaagtgcatagtgccgtcgttttaactgtaagtgcaatgttgtagagcagttctctagaacttatccagctgcataactgaaactttatacccagttgaatagcagctctatttttccctacccccagtgcctgcaaccaccatctattctctgctcctacaagtttgactatttcagattcctcgtcagtgggaatcacgcagtagttgtcctgtgactggcttatgtcacttagcataatgtcctcaagattcattcatgttgttgcatatggcaggatttccttcctttttaaggctgaaaaatatcccattgtatgtatatgacacattttctttatctacagacatttaggttgtttccacatgtcagctattgtgaataatgctgcaatgaacatgggagtgcaagatcctgatttcaattctttttaataaatacccagaagtgggattattgattggatcacatggtaattctatttttaattttttaaggaaactccatactgctttccatagcagcttcaccattttgcattctcaccaacaatgtacaaggaaacacatatttttaataatcaaaatatgtacatatctataattttggccttttggaaaacaagtccaaagtcacaggagttcatgaaggtgttcacagtcttcagtcagtttactcctacagattgatcccagggaggaacaggaggaaataagaaatgcccttgggctgtcccagaaacctgctgcttccttgcagccacttcctaggactcactggtccagtgtgagggaagcaattggataaatgatgctagttcaacactatgggatactgtgtagctactccataatagtaattacagaaactttgcggtccatataatctgtagaaacatggaaaatgtttattaggtaataataaacatttttaggttaactgaaaaatatcagacgtgaaagtggtgtgaggggggtggggtttatataattcattgttattttcattttcaactattgtaatggtttctatccttgttcatcagagtgtggcccactcaagcagcagcaatatcagctaggttcaccctggagctcgttagaaatgcagaatttttagccccactccagatctaccaaaccaaaatttgcattttatcaagattcccaagtgattcgtatgtgccttatggcttatctttttcttttttttttttttaatgtatttgttgaaggagctccttaatttggtcttcaagccatctacagatgaggggataagatttaagttaagtgacttaaccagagttgtgcaccatgtaatgtcagctgtcaagcccaagtcccctgattctgaggctacagctaaattcaggctagccacagcctgcctggccttgtgtttctgtgccaggccttcctccatatggcctgaggtggcccacccactgtcaccttccttaggctaaacagcatgggcagtgactaccatcaacaagggcccctatttcagtaaaaagaggacaggctgaggtttctgaaaacattcctgtctctcccatgggttcctgatagcactcccctgaacccaatccaaggggctgaggattcgtgtttgtgagccaccttggagtggtggagatgaaagtaagcagggcagagggccaccgcacatcaattgaagccacctggctctcatctagttcaactgcatccattttcagaagaagaaacatacccggagagggaagtgacttgccttaagcaacaaagctaaattcaaggctaagaggagaggctggcatagagggcaacccggatatgggaattcagggtagtgtggttgggagcacctgaaaagacacctgccatgtggggaaagaacagggatgtccagagtactccctgaagaacaggtgtgtagtatcctcccataatgctgtgatcctttgtcattaatgtacccctttctaagcaaaagtttatcctagctctccgcactgagaaaggcttgctccctgtcctgtgtgttgtgcatcctcaagtgcctttaccctcgtcaaccactgacaaagcagaatgagagtcatctgaaaggtggatttaaataaataaaattaactctttagttaaggtctgctgaaaaggcatgattttattgcacactcacaatatgacaggtgctgtgctactcatcaacactcttttcaaaacaggatttggagacaggattcttcaaaagagaactgcacattcaactaaacatgtccaaaaaacttcaactcttttgaattagtctccaaatctacacaaaccatagaaaatagaagatcattaaaatacatgattatacacagacaaatggacaaatgaaacagtaattaatattgcttgagctcagattgctcctgtaagatctgcagaaatcgtatgatggggtaaggttttctagaacaatatttcatcaggagataatggcagtatctcattagactaaaaggagatgatagatgctggaagatcagttttcatacagctcttctctgttcataataatactgtgcaccttctccaaatgacaaagaagtaaattcatactccatcaaaataacctcaaaacagtgagccatttcagggttttaaaaattagtccagaattgtttggcccccgtaaaaagactctgctacaaaacttagattgcacgtaggtagaatatgttttagtattttgcaggtaaaaaataacatatggttaactataaacaaggaatatacgtgcaaagtatttatatccttaacatttgctactcaaaggtaatttctaaagtatgtagaatgagctaattttttttaaataaaaaaagccttccttgaagtgcccgcttttggcattctaaatattctctctctcagacacacacactctccatccacttcctctctaatcatggtgtatagatgcaagcagtatcgttggttctatgacaatacttttaaaactacaaaaccaagttctcccactttaatagatgatacatttgtttgttttcccattatgtgactcatctattagagtgggagaaaggtttttggtttttttttaaacgctgtgctcccagcaataaggatagtcaatggcacaaaataggtgttcaatgaataattaattcacagtgaattctcttacctttgctctcctatatcttctaaatgtcccatgtatgatttttataataagaagtaaaaataataagttatttttagaagtaccagaatctcaaagtgaccagtatggatcattacatgatgagttctaaagggtaaagatttccttatttgtcatcacgtcctcagtacctgcccccaagtaggtgactaaacaagtttcatgattagatgaataaattaattagggaatgattgaattataaataaaaaagagcaggagagtattttatatataattagcttataaggaatcctatccctttccaccacatcactttctttttaaattatttttatatagaaatattttaatttactttttattattataaatacatggggtacatgtgcaggtttgttacgtgagtatattgcataatgctgatgtttgggcttcaagtgaactcatcacccaaatagtgaacatagtaccccaaaacttccaacaggtagtttttcaaccctggcctccttccatcctcctcccttttggagtctccagtatctaatatttccatctttatgtgcatatgtacccattgattagcttccacttataattgagaacatgcagtatcggattttgtttgtgagttatttcacttaggataatagccaccagctgcatccatgtggctatgacatgatttcattctttttcacatcacatcactttcaaatttgtttttgtagttttaaaagtattgtcatagaaccaacaatattgcttgcatctatacaccatgattagaaacgaagtggagtgtgtgtgtgtgtgtgtgtgtgtgagtgtgacagggtcttgctctgttacccaggctggagtgcaatggcatgatctcagctcactgcagcctcaacctcctaggtccaagcaatcctcccacttcagtagctcagtggtcagtagctcagaccacaagcatgtgccaccatgcccagctaatttttttatttttgcagagacagggtttccctatgttgcccagactggtcttgaactcctgggctcaagcattcctcccgcctcggcctctcaaagtgttgggattacaggcatgagccattgcacctggccaaaaagtggattttaaaatgtttttgtatatgcatctccagattggtgaaaataagaaagagggtggtgataagcagaaaaagacaagacaagaaggttttgcaccaaaagattatagacataaccataggctttgttgtcattgttgttactgttgtttactactgaattatgtgatggttatctttgtacttaccctattggagattcattaaacttcttaaatctgagaacatatgcatttcattacatttggaaagcttttagatataatttcttcaaaaatgtcttctgccccattttctagcttctagtctttgggactccaattgcacacgttaggcctttgatattggcctactttccctgaggctctgttcattttttttccaatttttcttctctctgttctgcaagtcagtgatttctactgactgctcttcaagttcactaaccctttcttctgtcatctacaatttactgtgaagttcaatcagggaattttttatttctcatattgcattttttgtatatgattcaattccatttggttctttttttaatttctatttctctagtgtaatttcctatttgttaattcattataagtctattctcatgtccttaaccacggttataataactactttaaaattctcgtcaactaattccaacatatggttcatctcagagcttgtctctattagccctttctcttaaatatgagtcatgtttccctgtttctttataataattttggattatgtcttggacattgtgagtgatatgttgtaaggactctgtcttttgttacattcatccaaaaagtgttatttttatttgtttgtttgttttagccagtaattaacatggctaaattcaatctctatctctcactaaaacagacaccaagtgaaatctctgtttagttgttttggccttagttgggctgcttgacgtctgtcttacacatgcatagttcagagaattgccagagacttaggtagagttttatacataaaattttgggctccctttccattgttttatcctttcttggatcctcctgcccttgatcccaatttacagctgctatagttaccctgaatgcttccctcttattcttctatttggtaagactgcatctatctgcattttagctgccctgcttagtactcactggggtctgccctcaggcaaaaaaaaaaaaaaaaacctattaaaaatgcatatttcacacatgatagtctttttgtccaaatgctggctcttgtctagcgtttgtttttggttcttctccatagccttcaggtttgtattggtgtttttttttttttcaatagtctactgtttttatttgtggaagggttggtcttataggaactattctgccagtagcagaagtggaaactcagatttccatattttagaaagtattctaaaggagtgttgagaatggatctgaaatgagactagggatagagaaaccagtcaggatatatagcagccacccagggaaaaggtaatgagagttcacagaacagcagcaatcaagtgcaatgaaagtttgtatttgcaagctccagactcttaaattccaactctgcagtaaaatagctaaaaacagtctgaactaaaatatcaagagtttttggatagagatgtaggttgtggtgagaggggaggcaatgatcttgagtggtattttcctatgaagtgtgagaagggaagtggaccagaggttgaaccctggagaagaggcagggagtgataggacaacagggtagctaagaaaagtcagagaagctggaaactggttgtgatgacactgagactagaaagttgtggccagacccggtagcttatgcctgtaatccaaatgttttcggaggctgaggcgggtggatcacctgaggtcaggagtttgagaccggcctgacgaatgtggtgaaacaccatctctactaaaaaaaaaaaaaaaaaaacctcaaagattagccagacacagacgtggtggcgtgtgcctgtagtcccagctactcaggaggctgaagcaggagaattgcttgaacccaggagacagaggttgcagcaagccgagatcgtgccactacactccagcctgggtgacagagtgagactccatctcaaaaaacaaaaaacaacaaaagaaagaaagttgcaaaaggagtgttactgattaataacattgaatgcctcaaattaatcaggtaagctgaggtccaaaaaactcccattggatttgcaattggaaagtcactggtgacctttgtgagaacaatttcagatggtggaaaaggcacattggagagggttaaaaagtgaatggaaggtgaggaagagcacagcatcctatgtcatagatgccttcaaagcatttcactcgatttcccttgttctttttccacataaaatttctacaaatttcataatcgtgtatcacacaattttcaaaaaatgtaattaatctatattttgtttcagtttttatgtgactgtctttgaaaaaagtaccatctgattgttctttcaaaataacagaaataaacagttggaaaaaaggattataatgtggcagaaccttttttcccctttttagttgacatgtaatcattgcacatataaaaactttcaataattctgatttgaatgtgttaagtttcaaaacatctgagtgggtgtcaattaaactgttccaagtctggaatttagaagagagttttaagccttatacattttttaaaagtttaatatcctgtttagaatgtactgagttgctgagagcatctcagattttgaaaaagtttcagaatataaatgggaatacaaatggggcacaaataaccacgagggctttagtgagtgtatcaggattcagttttacagcatagagacgtgattaacctcatagcctgcctttctgggaacagctgagaaggaaggaggaccagagcacatggcacagcagttgggaaccatcaatcgcatcagtccagctgcctgggaactttaaaatggagagcgtttaattggaaaacccgaattttactaagaggccaggggattcatgggaacatgaaaggagtgagactaggattaagttttttgagcaaaggagagtagaagaaaactcttacatcacaagtaatgatgttctggtaagacagaaaactcagggtgggttagggagcaccaggcacacccagagtgtggcaataggtagtgttggctcaggagttaaagagacttaggtgtaaagcctggctttgaacttgggacagttttttatcctctttgaattctagttccttcatttataaaacagtaataatacagtaataatgtctactctggaggcttataaggaaatgagataatgtaagaaaagaggccggtgatgtcactcaataaggcaaatatctgcttagagtcgtaataataatatatattatatatataaaactaatatataatgtatataagtaatatatatataacatataattatatataatacatatttagccactgtgcctggctaaagtggtaataatatagtaactgaaagatagaaaatttaaatgtccaacaatagattgaccaactaaattatagagcaactgtataatgaaatattatatttgtaattatatttgaaagagcataatgggtcaggtgtggtggctcatgcctgtaatcccagcgctttgggagagactaaggcaggtggatcacttgaggccaggagttcaagaccagcctgcccaacatggtgaaaccctgtctctactaaaaaaatacaaaaaagttagccaggcatggtggcacacacctgtaatcccagctactcaggaagctgagggacaagaattgcttgaactcaggaagcagaggttacagtgagccgagatcacaccactgcattccagcctgggtgacagagcaggactctgtctcaaaacaaaacaaaacaaaacaaagtgcataatatataaggaagtatttgtcatataaagttatatgaccagaccagaataaataatgcatacaaatataatatttaaaaagaaagtttatacatcaaaatgttaaagtgattgtagtttagactgagagattttggttttctttttacaaaaaaaacccataaacacgaattttggtagctttctgagttttctatgatgagaattgcttttataagaatatggaattttaattggagataataaatagtgaatgttttcatgtcactggtgttacccttatcagtgtattgttcttatttgctgttccccaaatccacctctggctttacccctgggaaaatggcaacaatccagcagaaaccaaatctgtggacctagaggaattaaaaggatttttcttcatttactttgggtggttttgtctggctgggtgtgcctcatactgacaggaagtgtgtgtcaccagaaaagaatttaattctttgcagcaaaaagatggttagtggaaagagagaaaaacactcatgagtgcttctcacagattcggcttcattgtgtcaaactggctccccttcccagttggacccacccagagaagaggtgcccccactcagaatccacactgttccaacagaccaggaatgtgtaggggcctcccagtccaccaagaggccagcttgtttgacccccggtgtataaacctggctttgcctcttgaaagagtaaccacccctctctgtgcctcagtttctcaactgtaaaacttatacgtctgccacccccactaaaaagtgagtccctgtgagcacaaggacagagctttatacctttctgtatccgtacagcttagcccagcaccgaggctcagttcatgtccattgaataaaatgacaaagttgttttaagtggctttttaaatgtgccatccaatgtttgcaattaaatttgtggagccgggcgcggtcgctcacgcctgtaatcccagcactttgggaggccaaggcgggcagatcacgtgaggtcaggagttcaagaccagcctgaccaacatggcaaaaccccatctctactaaaaatacaaaatgacccaggcgtggtggcacaagcctgtaatcccagctactcgggagactgaggtaggagaatcgcttgaacccgggagacggagggtgcagtgagctgagattgtgccattgcactccagcctgggcgacagagtgagactccgtctcaatcaatcaatgaatttgtgatcgtgggcctctggtgtaatatttctggggaaaaaaattaaggcaaacatagggaaatgttaagatctgataagtctgtatggtagacacatgaatggatctaactaatatccatattaatcactgattttcagtttccttgtccacaaaataatatctacttcattgagacttttgtgtcttgaacaagaagtgttaggtcaagtgcttagcacatttgtgtcctaactcttttcttgcagcaagaggaatgaaaggtagctctcattacttgattttttaattctaatgcttaaaatcggactatctgatttgtaggatctgaccacagtcatcctggctatcatcccacagtggctgtgtcccatagtgacatagatatttcaatggagaaaagattggaccacattagggcagatgattgatctcagccaatatctcacccagtattggaagccttccacagtaatgtatgaaagtataattgattgcctattcatttaccaaacaccacatgctgggcattgcaccaagcacaggaaattaatagatgcgaagacctaattccctggccacaaaaaattcactgtgtagtagcagagacagaggcagaaacaaattatttcaatagaattcagtatatgctagattattagcccaaaggaagaagtaaaacatttacccacacttagcaatcacatttagctatttcatttttagtaatgaggcctatagctctcacatacctttgaattttagaaaatgttaagacgactctttttgctgaaaataaaaagatatcaccttcacaaaggatgagctcatttacgtaggaaataaaataaagctattgtgtcagtatatacagaaatgaatgtaaatgcagagatgaagcttgggcagggaacacaccattgccaaagtgcttattgggagagaggagaaggtaataggagggtggtgagaaggttgttcccttgtttcccatatatttctgtattatttgaagattttaaatcaaagatgtattcatatattgtttatgttataattgcattattgtctatgtacagaaagaaagaaagaagtcttctcccagatatccacatctgcttcagatctttgttcaaatgtcactttctgaatatcctatttttaaattgccacctcaccaccattaaaatccccatccccttctctgtcttcatagcatttaccacaatctgacatcctatatattttacttttttacaaaatattattgtctgtctctcccagacaattagaatgtaggctctgtgagagctgagattagtgtgtgccagctttacagctgtaaacccagggccgaggacatataccaggtgttccacaggccaacagcctgaatgtatacagcattatgctaacagcagttatttctgaatggagagactacagatgtcttttattttcttcattctgctacttggtatctgaatttttgtaatgagcgcatattaattatattacctaagaaaacaacaaagctctttgaatttattattattttaataacctgggaactaagaaagaggctccagtagaagccaccatggaaggagtaagggcctagtgggagtcaggccaaagagcataggcgaaatctcctgagatacttggtggagtaaagttagttggaattaaaaaaccaactaacttatgactcctccactgcctcgcagtttccagacatccgcaaaaatgcctggtgcacgggtcactgtttcacaaagggtcttctgcctcatagcttcccatccccaagcagcggggcccagaaatttgcccacatccttccatccagcaaatgtttttatctgggtcctacttaggtttcagccaattctttgctgagcaacttggcttcctgttttccttgggaaccagactctttttaagttggagccataaaaagaatgaaatcctttacctgatacttttctattcgggtattcaagcctgccacagacggaggccctgtgggccactctctcgttgtgggcactggcatcttagcccagcactttgaataaggcacatgtgagagtgaatgctgcgcttttttcattcttttcttctctctctcttgttttttttctgttctatttctaattgaaagccattgtcttgagtgaatgattgtagagaaggcttactcctcatctcaaaatgccatctcataggagcaatgggagaaagtggtcctgccagtctgaaagttaagagacttggtttctcataattgttctgccattaagttgttacgtgatcttagtcaaatcatgttacctccccgggcctccgtttcttcatctgcaaaataaagttctttgcagtgtttctcaagtccctgcccaaatcagtgtttgtttaactgaggatgaacagtgacaccttgtggttctccttgagccatgtctttgttttttctagcccaagtttaagggagccaagggtatctttgcctgttcccctgcctggcccacctaccctagcagcttcacttagcatggctctaacctggtctccccctagattcagaaaagtgcatccaccctttgttcaccagctgcttcccagcctcaacttggccaatgttgctaaaatcaaactacaagtagactgcagacgccagcgtgaaggcctgtgcttctgtggtgaggtctgcggtttggtgtgaatgtgagggtatcagccccaggtgttttttagggctgctagtgcagtcccagagagggacctgggcaacagctcaaggagcaagactgaagattttactgttttccagcactcctacgaatttgtaaaattatcagattccaaattgttctatgccatagtttttccattcataaaataagaaaaatctgccatagcactgccttcaaactcagttagtctattcattcatttacttatttgttcttcaaatatttaataagcatcttcctggtgccaagttctgagcacctacctgtgccagtagtccgaacttgagaagacacagtctctacttttcaagaccctgttcttgtctaatgaagaagagagaaggaggaaaaacttccattgccatgcaataaggtaagcttatggcagataatgtgtacacataatggcatggaagcctggggacaaacatcatactaggcctgggaagaatgtttgacagagaacaggacacttaaatacggacgtttacagaatggagtttgccagaggagactcttcaggaagagagaacagagtgggaataggtacataaacatgatctatctagatgccctaccgtaaaatcaaaacacaaaaccctactgactcaattccctccccttccagatattaccccatttctctacttcccattgtagccaaactttccaaaaattcatgttctgtcttcatttcctcatgttcaacccaccctgtcttagctaccacccctcagtaacgacctagcctgggtagaaacaaatgtcagcatgataccatactcaatgatccttcgtcactgttgtcattgtcatcattccatggccttactttccctctcagcgccatttgctacagtaagaaactttctttcttgaattcttgtttctcttggcttccatgacacccactctcctattcatgctccaggttcactgtctgctccttcctggtctccctgttcagctcctcctactccgttcaacattaaatgtcaatattcttttcttctttctatctaggaaatctcattcattcccatggttttaaatgtcatgtaccagctcctaaattttgtatatccaaacctgacctctgaaatccagtcttagcaactagtgaggtctcagcttaaatattacctgaaggttgtgtgatcttccctgacatttgtcttcttatctgcttctcgctagattgagagccccacgcaggcagattcatccttactttcttcaaacttgcatgtttaatgattagaacagttcccaggatactcaaaaattatttgttaactaatttctgaatgaaatataagtaaatataagtatttaaaatagaataaatctgtgattttgattgtttttaagaaattattcactcaatccagttcaagttcagccaggcaagcctcacaaaggagcatatgcttaatgtttcaggatgtgatctaatttttaattgtttcttgatacaaagtatcacctttttctagtgactgtttctcctcctccatcatctactcttgcccagtgggagatttcccagtgaaatcccaccgatgatctgaatcagaacatttcattctccatggttatttcaagttcacagactttatttgtggcccttgtggcagttgatactttttcaggaaatactatagttgcagcaggccctgttacagcttagtggatattcatgttgtggatgcttttttaccgaaacacacagtaaccaagtatccaggagcgggagctagagacactgtggtccagacctgtggaaaagggaacaccactcctggcaaagggaagcaacaggcagcacattttgttcaaagaaacaaggtgaaccctcttggagttaaacttgaggctgacatccatttcagcttgaggcttccaaggcacaaagcagctcccagtagctgagagggatcaagaaatagaatatcctcatctttcctttgtagcaagagccttcagaaaggaggaccactggtcacctggaatggaaagttattattaaaataaagctccagtcacattattcaggaaactttgggaatgtttataaatagataaaaataataatggccaaggaacattcctctctccaaatctccctgagacaatactgaccaagttaaacatgccttgtttctgagattgagtcccaggtctacctctgataaatcagatggacaattacttaaccactctcaacttttatttcctcctctttaaaatgggcaaaatgtgaccaggtacagtggctcttgcctgtaatcccagaactttgggaggctgagacgggaggactgcttgagcccaggagttagagaccaacctgggcaacatagcaagaccccatctctaaaaaaaataaacaaataaaaataaaaataaaatgggcaaaataatgtcctcacaccatcactatgaagattaaatgagacaatacctgtcaagtgcagatacaatacctgggacacagtagtagctcagtaaaaataaatactttccatcccttgatatctaagcagaagaaaatgccctaaagatatagatattctctagagaatttttttctacatttgctcaaacatatgaataaataatacagcagcctagacaggaagggacacccagcattgaattataatttgtgctttccagagctgtctgcctattaccctggtatgtttgttcaccttcatattcctgcatctaacagacttcctggcatataacaggtgcacaaaatgtttgctggcttgaattaaactacacctgcactgtaggtcctaccctcatatgactattaagcacttgaaatgtggttagtctgaattgattgtgctgtgaatgcaaaacacacagcaggttttgaaaatttagtagcccttttttggggctactaaatgtaaaatatttcattattaatttttatatccattacatgttaaaatgatatatcacatacatcgggttcaataatatatgttaaaattaatttcacctgttcctgtctactttttttttttttttttgagacggggtctctgtcgcccaggctggagtgcaatggtgtgatcattgctcactgcaacctcgaactcctgggctcaagtgagccttccacctctgcctctcaaaaaactggaactacaagcacacattaacacacccagctaattttttaaaatatttttgtagagatggggtcttgccgtgttgcctagggtggtctcgaactcaagtgatcctcccacctaagcctcccaaattgctgggattaccagcataaaccaccttctatttctttaatgtgattactagaaaattttaaattacatgtatggcttatacattatatttctaatggacaaagcagaactagactataggccaccaattggctgaaaggtcattgaatatgtatatctcagactttttctctggacctcctctcttgttaaagttatacaagctctacaaggcattttctagttccagtattctatgatcatatgaactttagactacagtttcttatgtaagaaaactgattaagttgctagtctgggccaaacacttttgtacacactgttatttagtctgtataacacacttaagagggaagaatgaccctcctcatttaataagtgtaaaaagaagacccacagaagttaagaaacttggctaatgtcacctggcttgtaagtgacagaactggcctggaatcttttcccgttttctccagttctttgtaagaattcccaacagaaaacacgattcaagagtcaatgtgggtgctttggcttggttattccctaagatatatttccttgagaagaatcgtatatcatcagaatcattgtaaaagggtatacaagaggatccttaaagaatggagaggaagccccggtgcttctcaagcttggtagatcattgacacctagcagtaaatgtagggaggcttctaaggaggtaagatcgagagccggaaaacaggggctgcttgctggtggttaattgttcaccagcttcagaagacaaggctgggaggacagcaggggagtgaaacattgaccagttctaatttagatgcaggaatgtgtgagggaggcacagaaaggtcggcacctgagacagctcccatgggcaaaattcctctcccagagactgggaaaggaacagggaatgtgctcagagaagaaagggctgctggcctcagaatgcatttattttgccaactcctacagccatttctagggcctacaacaacaacaaaatgatgagggcatgtttgacttttacaacacaccaaactctgttaaattttggagacctgggaccaagaagtaagggatagataaaacaaaaatgagttaaataagatactgcgcttgcattggagccaaactggaaaatgcgaactggacttgaaggctcttggacctgggttcaattcttggctccacctagccacttaatcctaggcaattcagtgactctcagtttactcaactggaaaagaaaagtaatgaaacttatctccaagagttgttatagtgattacatgataatgaggaagctcctgagtcctggtgcaatcaatattgagttgaagagtaggaaagactacattgtttaaaatggtccaagggctccccaaaacctttagtgaacggttcagtatggcttcctttcctccaagagcccagcttatttccacagcttccctcctaccctctgcctcttcacccctacctaaccggggtcagcttctgatttgtgacacttttagaatcaacatcctgattgctgagactcagtatttcattctgtaacattttctgaagaagactttaactcaccgaggggagttgacccttcaaaggcccttctttagcacaagccgccaagctaccttttccgcggttagcccttggccctgtgggggtgagcttgatcaccccagacatcacttgacaaggagcatgttgcatttctcttaaaacacaaaacaaaaatttgctggctggctgcccagtttctgttacatagacccagattaaatttctcttggactggtttgtagagcccctggatgctggactgaaaagtgatttatgttttctcttggcagggaattacccaagtgaaaactgcattgaaaattaactgtttaactggagtgtgtgtgtgtgtgtgtgtgtgtgtgtgtgtgtgtcgtttacatttatatgcatgccctagtctggtccgattgataagctgcttctcattggctgacaagctttagaaacagaaaatcaagagccaggaaaagggacttataaatatgccaaccttaatagtagcagggttgccatgattaagttttaaatttgattctgaactccctggcaatcaaggcaaaaatgaaaacataatcaggcatgtagctctcaataacagaaaggaaggccctcctgacccttcttgaaagtattcagaatattacaataataacaactgtcatttactgagcactctctatgtaccaagagcatattttgtgcttgtaacaaccaaacaaattagttttttcttttatggttgaaaaaattaggcttacagaggtgatgacttttgtaagactttccagttagtagcagttgaaacctgaattactatccaagtatatctgactccagctactaaccaacactgtctttccagcctgtgatagacatgtcttcagtaacgttttcatagcaaatgtgctacttttaatggctgtttgaccttcaagtagaaatttcaaaatttgggggtttgtttcgtgtcatattcaaactgaaaatgagttgagtgactgagcctcagagctttgctccatcccctttcccatcagaaagtaaagaataaaactaaatatatattgagtctaccatgctaggtgccctacattcatttctttatttaaacttcacccaaggccggatgcagtggctcacacctgtaatcccagcactttgggaggccgaggtgggtggatcacctgagatcaggagttcgaaaccagcctgaccaatatggtgaaaccccgtctccactaaaaatacaaaaattagccgggcgtggtgccgtgcacctgtagtcccagctacttgggaggctgaggcagaagaatcacttgaaccagggaggcagaggttacagtgagccaagatcgcaccactgcactccagactaggtgacaagaacgagactgcatctcacaaaaataaataaataataaaatataaataaacttcaccctaaaaaaaagtgtgacttagagtcctaataaaagatttttggttaccagttgcaagacccacctgaaagagtttaaataaaggggtacccataattataaataatgtgtatctggaagaactcaagggcgggaagtgtggctgagcttcataagagagacaaggagcagaaactgggaagtcagaacactgactggacctacttctccagggggtattgtcttttgaccctgcttctctatgcatctcttatgttggggtgaaccttcttgtttccaagtacaaaaacctccattagggttacactcctggattttggttcatgaatttggggaaaggaccaagcactcatagttcaactgtttcccctcgcatttttcccctccatctacgtggggcagcctctggctattcagggttgtctatgaaaagtctgtctcattatgtgttcagcattgccacactaaactatgtttatctgcaaaaagctcatgcgttactcctcctctgccataacctcatgaatcccttaattggtttggaagtgaggcaaggaaaggggaggttacttattgggccccctcaaactccaacatgtagtcagatagggttacccagtcatgctgtcacccccacttcccagatcaagaattaacagaacctctggattctattcttaaggattttttagattctgactgagctaacttgagtcagtccaccatgggtccaatcagctttgccaggggcctggagtcacgtggtgcagagaggaggagagtagtcagagggaaagaatcaagggctaagcagatacctcaaggtttctattataggcaggcgttgtcatctcctgttcaccagtggagaaattgcatcttagggagaagacagtctcacagctaatatcagagctaaaattcataccgaggtctgattgactctaaaggttatgttcctaacacagttataagatctcagaagctgaccctgagctggcattctccagttggcattgagtagaataactggcatcgtgtaaactagcccaacagtaatactgataagaaagcagagctaagattttaccttctcattttttaaatttttttttagattttaaaaatgagacggggtatcactatattgcccagtctggtcttgaactcctaagctcaagcagtcctcccaccttgacctcccaatgtgctgggattacaggcataagccactgtgcccggccttaccttctaatttttagtgacatcttcttttcctttctccttctgaactaccctagaaatatgagcggcaaagactaataaaaagaatactaggccgggcgtggtggctcacgcctgtaagccaggggaggctgaggcaggaggatcacttgaggtcaggagtttgagaccagcctgcacctgtagtcccagctactcaggggctgaggcttaaacccaggaggtggaggttgcagtgagctgagattgcaccactgcactccagcctgggtgacaagagagaaactccgtctcaaaaaaaaaaaaagtatactgtacttggtcccagaaagtctccacttacaagctccatgtccttaaaacacacagatattaagctctttgatcatcattcagttttttcatttatttagcctacatagatgtatgtatgtatatgtatatatgtatatgttaatgtaatatatattaagcatatgtattatatacttataatacatattatacataaatatatgtatatgttaatatatattaagcatatgtattacaaatattttatacttataaatatatatgtattatatataagtatatgtatttattatatacttatacatatgtttaatacatattacattaacataaatatacttacataagtatataatacatatgtttaatattgcattacattaatatatatataaatctataatacatatgcttaatatatattaatgccaggctgggtgtggtggctcacacctgtaatcccagcactttgggaggctgaggcaggcagatcatgaggtcaggagatcgagatcatcctggctaacacagtaaaaccccatctctactaaaaatacaaaacattagccgagcgtggtggcagacacctatagtcccagctacttgggaggctgaggcaggagaatggcttgaacccagaagacggagcttgcagtgagccgagatcgcgccactgcactccagcctgggcgacaaagcaagactctgtctcaaaaaaaaaaaaaaaaaaaaaaaaaaaaaaaattggcaagacatatacagcatataatacattatgttatatattaatatataatacataggttttattattatatcaacagatatattggatatctacaacatactaagtaaatcaaaataaaacaaatcctaccagatgcttagcttctaatgtgagaaatgcaaattaaaagtaactacactgaaataatgtttttctgctctcagatctccaaatgtccaaatgttctgcaacacatgtaggtgaggcgcacttaaacattgtggatgggaatatgaagtggtacaatcccatggaaagcaatttgtcaaaaattattaaaccacaaacttggctgggtgcggtgcctcgtgcctgtaatcctagcactttgggaggccgaggtgggcagatcacctgaggttgggagttcaggaccagcctgaccaacatggagaaaccccgtctctactaaaaacacaaaattagccgggcatggtggcgcaagtttgtaatcccagctactggggtaggctgaggcaggcgaatcgcttgaacctgggaagcggaggttgcggtgagccaagatcgcgccattgtactccagcctgggcaacaacagcgaaactccgtctcaaaaaaaaaaaacaaaaaaaaaaaccccacaaactcaaggccgggtgtagtggctcatgcctataatcctagtactttgggaagccgaggcaggcggatcacctgaggtcaggagttcaagatgagcctggccaacatggcgaaacctcatctctactaaaaatacaaaaattaaccatgcatggtggcatatgcctttaatcccagatacttgggaggctgaggcaggagaatcgcttgaacctgggaggcggaggttgcagtgagccaagattgtgcctggatgacaaagcgagactccgtctcaaaaataataataatttaaaatacaaactcatatacaatttgtaccagcaatttggtttccaggaaattatgcttcaagtgttctcacactcataagaaataacatctgtatatgattgttatcattgcggcattgtttatgatcacgaaagattaaaaacaattaaatggccatcagcacaggcctagatcatttatagagtggacctctgggcatcaatgacagaaaatgaggaagctctctaagttgtgaaatggaaaactgccaaaacataaaagtgagtggaaaaaacaaggtgcggaacagtgtgtagagtgtgcatatgtgtaaaaagtatatacattagtattagcaatactaatagtataacactaatagtattcataatttgttatttgctaatatatacaaatatagtattatactatactataatagtattagttatagtggtatagtatgtgtatatatgtttgtgtatatgtgtatgtatacaaaatcttgtataggcattaaaaaatatctggggaaaaaaactgatatcaagaagttcctttaaaaaaaaaaatgtggggtgggaagccaggcaaatagggacagggatgggaataaaacttttgacagaatatctttttagaatttttgaaccaacatgaatgtataagctattcaaaaattgaaataaatatatgcagtttgtaaaatgacaacagtgcagtgaatgttaggaaggggaagcccagggccccacaggaacatgtaacaggggatctaacttagtctacagggcctagggaaattccctgatgaagctgcttttaaactgagactggaagaataaataagcaaagaggaaagtggatgaagaatggctgaccagggccgggcgcggcggctcacgtctgtaatcccagcactttgggaggccgaggcgggcggatcacaaggtcaggagatcgagaccatcctagcaaacacagtgaaaccccgtctctactaaaaatacaaaaattagccgggcgtggtggcgggcgcctgtagtcctagctgctggggaggctgaggcaggagaatggtgtgaacctgggaggcggagcttgcagtgagccgagatcgcgccactgcactccagcctgggcgacagagcgagactccgtctcaaaaaaaaaaaaaaaagaacggctgaccagaaaaagggacctcacgtacaaaagccctgagcaggtaaagtgcttcacagtcaaggagtagaaacatacccagtatggccagaacacagaaaaacagcgggcaggaagatgcaggaaggagtagccaaagctaaaaggaaagtgagggccaaattgtgcaggctacgtgaaaaatgtctggacttgctcctaagggcaatgggaagccattgaaggagtttaagcaggaaagtgatgggatcaaggttatgttttaaatggattgctctggagcctatgaggagaaatgactggaggaagcaagactggatgttgacaactcatatatctgacaaactactttggaaaactgtctggcagtttcttataaagttaaacatacatctaccctatgacctagcaatttcattcttgggtatttatccaagttaaatgaaaacatatgttcacaaaatatttgtacaaaatttgttatagcagttgtattcatagtagcaaaaatgatgaagaaaaaagccactaaatttccatcaaaaaatgaattaataagcaaattgtggtgtatttctacaatggcataccactcagcaatacaatggaaggaattcctcacacacacaacatgaatgagtcttaaatccatgaaaaaaaagcacagatgtgtacatactgtatgattccaatgatatgaaatgaaatcaatgtacataaaaaatagtccctagtaatagaaatcagaaagtagttgcctagaggaaggagacattgactggaaagaaaaaaatgaaggattattctggggcgatggaaatattgtatctctttttgtacatggcagttacccagtgtatacaactgtcaaaacttatcaaagcaaaacagctggacttgtgctttttattatctcaagctccggagctcaagtgacccactcaccttggcctcctaaagtgctgggattacaggcatgagccatcgttctcagcgtgctttttattaactgtacttcaattttttttaaaaaaaagagtggacattgaggaagataggaggcaactgtaataatccaggagaagggtgacggtagcctggtgccctattattggggaccaaataaaataacatgtataagagggcaaacaataaaacttcatgcaaaccatgaagctctatgcaaactgtgaatctttgtgcaaaagtgaggaccgagtctaacttaacccctatcaaaatttggaggtgatggagacttccaaaattgcccccgaggcagtcccattgtttgcaatgaagggctggggggtgattaatcatgatcatgtggttggtttgtcacagtttggcaggaagtgggaccaatgactgctgagagtcatcagaatacttgaccttggggcaaaaagcaggggaggggcaggagctgcttttgccagaagtcgttttctactgaaaattaggctttcccaaacaagaagtgtattcagctgctagactggagtcttgaatttatttttttgtataattagggtttgaaggatacagcaaaaaaggaagcagactgtcagttcctgaagcaggggccatcaccatcagtgacacggccacccagcctccagaagagtttgctgggggctgagagtgtgtgggaaatacatgggggctgcttgcaagcatctgcctctgactgcagacaggtttggagaaacagctgtgtggaaatcaggcaaaagctatctgaagaactgttcactcaccatttaactgaattcaactttgtttccatgactttttttttttttagtgttaatacatctctgattatttgctttaatttaatgttgattttgttttctcaaaaccacttggaatgagcagacacagctggatcctccctgtttaccccagtggatgctaaatgctttggtgaagaggagacatccctgcacaaagcagagctgtggattctctgacctccttgaagactctcttctgagctgcagtggacatttgccatatttttattaatgggtgtctgtcatcaaatctccctctgtaagggttggtcactgttgtggcttctctcgatgtgaggtcggactcaccttccatatcaaaagtggacaaaatcacactcacactctcttgttcacacataaacacacaaccctggcacaatctgagggtcagtaactgactttggctcagcccaccaagtggtctttccctgaagtgtgaatctcagggaagcaatacaaaaacaggcagggggtgggtggctacctctggagacagctggaggtcgtcctttcaaaagcaggctggcgggcacgctgaccaaactactcctgccaaggagccattgctgtggttcctttggactggacttctgactctcccctaatttctactcatttctaaggttaattctctttactctccaaccactccaatacatttccttccatttatgttctctagagtctgttttcattgctgacacctaaggtggtgcataattataagccagcgtgatttcatttcctatctgaagccttcgaaaaaaatggctctcaagcagtatctcagacacccaaatccaaggctttactttggtggccatggaaagacacctgaatgggtgggcgtgggaatagggtaagagaagtagaaaagaggaagggaaaagagaaagtactgcatatttcatacctactatagtctaggactgaggatacagcaatgatcaacataggcagaggctctaacagatgccaggagccagctaggcatttgtccggctatcttatgataatattatagggagggaggtgctcccataccccaagtgggaagagtgcggctcagtgaggctgagaaacttgccgtgggtcacacagcagatgactattggagctggaatctgaaccagatctcattcctaccatatctgctctttccactacataaatttgttaaacaatggtgggtaaaccatgcacctttttttcttttcgtattttgatttcagtgttgtatccatgatttggaacgagcccacctgagcctaatgatgcgacgagatcattggattatatatgtatttactttaaaaacacaaggtagaaaactttactgagtccatgaaaagaaaagctggagacacgtcaaagcctgttttgatttaagtggaatagatccagcttgagtgtaaattcgagactgtgtttgcttgtgtcacactctatttttcaaattactttcatatgtcctgtttcatttatttcccccagttcggaatgggaaaactgaggcctgggacttgaaataacagatgtatgtttgtacagcaaatcatcatgagagccaaaactcaaacccatactctctcaccgaaccccactgcttctttcagcacacaataattattattatgccaagtaagtttaacaaggtgacttggatcgattcattctgatgatttgagttggctcctgggatcatctgggtaaatattaggcccacatctctttccaaacatattccatctctctctctctctttggttttttcttttttctacattttcacctctgctccctcatcatacctccctccctttctctgttgaactcctccccttctcttctttcctcccttcctctcatcctctcacccacaaaaacatttgtttgtcttacatagggatagtgtcatgtgactgggtggctgaaaggagaagtatcttttaagctcctggaagcagaatattttcttatggattttttattgtttggattgttttgccaggctaatgaaagaagactctgaggtccccttatctcaggccaactagaggatgccttcaagtttttgtttttcttcccaagctggttccttacaaatgcatccagaaggtcattcccaggtccccaagatagtggtgggtaatcaatcacatccaggacatcagcatcacagcagataagctcatgcatgggaggatttgggaaaggagagaggggatcctaaactatccctgaaccatgtgctccagcaaaggcaagtggagggattactttttctaggagttcactgggacagccacaagtatattctagctccaatgaccattcttcccttttgatttttgactcaaaacaaataaaaatacacatacataaaatccttaaacatttcctatataatctgataattgcaattcagcaagcaataaagattgtgtgattgtgtttaacagctccaagggatgggtccacacagggcccccaggcaataactaatccctctgaaacaaacagagaggactccagacctggctttgccaaggacaagttttgtaagcttatttaagtcacctgacttctctaggcctcagattcctcagctataaaataatgagctagtttattatttcaaccaatgcttattaaacatccactttgtgtcaggctttgtgcaagaagctggaaatatttttaaagtatagacacagtatctgttctcagggtctcagtgtttaatgcgggaaaagatgcatcataagagaaaagtgctgtggacggcaaaggcaaaaacaactcagcccaggagcttatctttaggattcttcccaaccccaaaagtctacgtgtatggcatttttttgtctgttcattttgttttggttgtcttttcacatgaatgttatttcattctttcttgactagttgttttcaaatcattgttgcattgttgtcattatcatccattaccaattactaaacacatactgttaccccaaatgttgtaattaccccaactgttggtaattaccccaatgactctaaaagttagacattataatcactattttttatataataacactgaagcccagagaggttaagtaacttacccaagctcacatcgctagaaagttacggaactgggattggagttgacccctgccaactccaaagtacatgctctttctactacttggtgctgccttaggtatatgtagccacttaggacaaacatcatttacaggagcaggtgtgatataaaaatatgaggccctttgttcaaatattattgaaaatttcaagatagcaacagcaaagcattaaacaaagcacaaggcctgtctaagcacagggctctgaatgactgcccatgttgcaaacccaggaatccagccctgccagccacaattcagtttgcaatggcatctcccactgaagcagaaaagcttcatagcaatttgcaggcccagatcacactcgcagaatgtttcagtgatcatgcttcacatgtaggatttctggcactacccagagggttcattgtgaaccacctggcaggacttgggggctctgtgtggtggctttttcagagtagccctggcacctaacctaaagaatattaatatcatttctggtaatgccaattactttatttttttttgagatggagttttgctcttgttgccaggctagagtgcaatggcacaatctcagctcaccacaacctctgcctcccaggttcaagtgattctcctgcctcagcctcccgagtagctgggattacaggcatgtgacaccacacctggctaattttgtatttttggtagagacaaggtttctccatgttggtcaggctggtctcgaactcccgacctcaggtgatccgaccacctcgacctcccaaagtgctgggattacaggcgtgaaccacagcgcccggccagccaattactttttttaatgtggggaaaggtatataatcttgctgaaagagttttgctccgtgtgatggttcatacctgtaatcccagtattttgggaggctgaggcaggaggatggcttgagcccaagagtttgagaccagcctgggaaacagagacccctgtctctacaaaaaatacaaaaaattagccaggcatggtggtatgtacctgtagtaggaggctgagctgggaggatcacttgagcctgggaggttgaggccacagtaagccatgatcatgccactgcactccagcctgggtgacagagtaaagaaaaaaaaaaaaaaagagttctggtcatacccttacacccttactcttacatttagaacatttagaacattaatgctgcataaatggaacatgtccaaaagcctcttaggatgcaagcctcttttgaaattgcaaactgggaccagtacatgtgccctaatagagggcagtaggaaaaaaagcaagagctttgcagctgctggattacgaacctctctactgaggcactaactcctattaaggtgttagctcctactgacccagcagaggctgagtaaagattgtcattttggtcaatgattcttaatcagtggtatttaatcttttgagatcacagaccccttctttgaaaagtatgaaccatctccccagaaaaaagacaggtgtatgtaaaatattcttgcattcaattgtagactctctgccttagccctagattttttaaaaccatattttaaagcatggctcccctaattatagaattgtcagaggcgtctgaaccagagcaactccatcttgagtaggggctgggtaaaataaggctgagacctactgggctgcattcccagacggttaggcattctaagtcacaggatgagataggaggtcagccaagatacaggtcatcaagaccttgctgataaaataggttgcagtaaagaagccagctgaagcccaccaaaaccaagatggccatgagagtgacctctggttgtcctcactgctacactcccaccagcaccatgacagtttacagatgccatggcaatgtcaggaagttaccctatatggtctaaaaggggaggcatgaataatccaccccttgtttagcatataatcaagaaataaccataaaaataggcaaccagaagccttctgtcagtggagtagccattcttttattcctttactttcttaataaacttgctttcactttatggactcgcctttaattctttcttgcgtgagatccagtaaccctcttttggggtctggatccggacccctttctggtaacagaatcttccagtgttagaactagacacaaacttagagatgatttttgtgaaagcaccttattcctagtggtgtgaaagctgaggtcatttgggataataaatggttctgcacattttcaaagagctaaccctcattgtcaacactaccttgaactagttgccccactcctaatttgctcctgtcaaaacactgcagccaaatgcaacaatccagtgccacaaatggctgctgccaggatgtcagtgaacatttgtcgagcacccgaaccagcattgggcgcaagaacagctcttgcccttgagaagctcaaacacatctagaggagaaacaaacaagaacaatataatgtaatataacacatgcaattacagatgtttgaactaggttcagaggtgccctaaaggaaggtgctacaggctctgcttgattggatcatgcgaggctcccagaagaggaaacgtgtatgcagggacttgaagaagaagaggaaacacttactcagggacttgaagaatgagcagaagggccacggagtgaaagagcctcctggctcaggagtccagcatgcaggagcagagaacactgaaacagcctgagaacaggaggagctggaagtggctgggattggctagagcatagggtgtgtctgaggaagaggaatgatgtggctggaagagaggggaagagccagacctgagggtcttggatatcactctgaggggtttggacataaagaagaatatcagccgatgtgatggattaaggagctccttcctgggggtggtgcaaggaggccagatagtcatctgtcctggatggccttccgaggggctgggggtaggggtggggtggggctggagtgagggcagcctctctgagatccctatcacctctctctttaaaaatcagccactgccaaacactagagaacctaagaaggcccctgtaaagcagaaacgacaggcagtcagcctagagtacacctttaaaaagtcagtaagacatatacaccagaaaaggaccatgcttctccattaaaagatagccaaatgggaggaggccttctcaaaaatatagggaaatttctcacttgatgtattgatgtttttcctctgcagagcttcacatttttcatccattcttaaaattgagccagtttagccctaggaggtgggcaggctctgaggaatcatcaatcaagagaagagaacatcgccagaaacacgtaagggaaacgtttccatgtcactacttctcaggattcctgggcattaagggtacttaagaagtgcttgtaaggagtgtgttttctcccaagcaaacacataaacaaaaaattctaattacagggacactgcattgagtctgtcctaaagttgttctgcctgtattcaccactaggtgtcattagagccctcttttaaaagaaacaaagcttcaaaaaacactgacctcaggagaataatttttccagtgttcctatttctcagttaaaaaaaaaaatatatatatatatatatatatattttttaacatgagtaaaaattgcaaatgttcaggacttagctcttgaatggctactaaagattataattcctcagactacctgcaaatatcatgagtcttacagaatcacaatacatttttattgaaatatccatggtaaatatacatcttacaggaaattccattgcgtttacactatttatttaatagaaataatctctgggattatttgcatttatttctgaaggaggatgtttttccttcctgagaataagttcaggaaatgggtgaaatgttcaggaagttagctaaatgctgatgtaaatccaaaaggaaggtctgttgttgtttctttctttttttttttttaaaggggtgggtgggggggacacacaaaaatgctaggaagtggttctctcattcacttatggaaaaatgttatactgaatttctgatttaaaaggaagaggattagaaaaaaatgtgggcccatgatatggttttctgtagatctggttaggcaattcacagtagttagcaaagaaaactgtgtcaagaaacaaaatctacatgggagacatgacttggattcagtttgtcctaaattaaacctttactatgaaatttgaatcggctactctaagaaataagtcgtgttagaaaactctgagtcccgaagagctggtggggccccttagcactacataaacaactaaatgctaccctctcctcccaaggaccctgtcccctccactaacagtgtcatgctgaccctcggactgcaagggggagtctgaatgcagtgaaactcaagatctccagggctacttggtcagtgttgcaagctgccgtggcctctggcgttatttatctttagtttgcaacgtaggggtgtgctgtatcgggtgtgcagagcaaacagaaactccttgcctctgaaacactggcattttagaaagcaaagattcggctcattgaccagagctacagaggacacaatttgttgtggcttctctgaaaatcaccccctcctttccatctctctgctaccaccttcattcaggccttcatggtttctcatccaaaccggtcttcctgtctcctgcttgccttcttcccagcccacagtccacacggcagacagagcaagctatgtaaaaacaccaacagggacatgaaccttccttgctttcaaacttttgccgactcccctgtgctgagcgcaggagagaatacggcctccaaggcctttcataacttggcctcagcccaccttccctcccactccaagaatctcaggctccagttacactgagccactcactgccctacacctcctgcaggcaactctctgccaagtttattcacacatttatccttttcactctggatacatgaggaggactgaccatgtactgtacttcttttaacttctatagagcaatctctttgtatttatacaattatgacaacagtagtaagagaagaaggttcagaggatacaaggtaacacacctacataaacgacctactgggtacaaatattgtaaatcaacataggcctagaaaaggtggtcagatgctgaattttgactaaatacctccgatggcacataatgagtaagtttcaatttttatattttacattctgaattctgggggtggttttgatgggcagaccaagttttaaatgagttatggtctttgggatcctcacttctctctttttcttcttccctccaccttccctacatatttacatcagcagatgtgtcctttgaggggtcaaatggtgagacgacagcagtttaggaactgtttgcccattacactgggtactcagaaactgttctattcaagctaaaccacaagacctatggacttaggaagaaattacatagtaagtgtgataggactagtagcattgatcctttgtgggaaggagggtagagggaggcacgtagtgtgctgcagcgaacttctagagggaaaggttatgtcttatttatctgtgtcccctacggtgccttcccaggacagtggctggcacacgatggaccctcatttcagctattcaacaaatatttactaagcagtagaggatttgtttttccacatttagagttttaagcttgttaatagcagctgaattctttctctgttttgtcatctgcacttttggactccaagttggacttcgtatttcctagtttttaaaaatcactccctttcccttccctagcccattccagtgttctatatacagtagactttcagcaaatatttaaaagagacaacttacaataggcaacacagtggggtagtcgatcattccctaacctatctttgaggctggagaattttcttgggggctagtgccctagtatcttcccagaaagtcctgccaacctgatggctcttgttgtcacctttggtttccttcctatggtggccatgtttgtcatcaaagcccttcagtttctccatctaacaaggttaaaaccctcccttcctcccctccttccttactccatttcttctttcctccctgccttccttccttatacatatattttgaaacttgtgccctgtgccaggcagtgtgccaagctctgacggtacataaatagacaactttaggtgctcaaagtcatgctcagggagctcagtttagtaagaaatggatgcatgcacagatcattgcaatcagtgcaaggaaggctcccagagttgaatgcacagaggcttaaacctacctatcaataaaaggaaagggaagcaggaagtggcaagcaggaggatcggggatgtcttcccaggaaagatgacccaaggctttaaaaaggacagacataacctagttgaagaaagatggaaaggacattccaggcaaaaggaaacaacgcatatgcaaaggcaaaggggtgagaggaacatgatgaaaccaggacaggattttctgtgacttatctattccatctcattgctttatattccacccatttacctcatatcaagtggaatgatgcaaccccaggcatttcaggaaatttacataaccaatcatttaatctcttaaagagaaaggcattgataatgcaggctttccatgagattaagcacgttcttgagtgaaaatagaattgggtgcttataggaaaccaggtggaaagctgatgaaaatcaggcagtggatggaaaatgcaatacatttgattttctattctctttccctgggaatttgagaagttggaatcctttgccatgagggtaaataaatctatgggccctcttagcctaaagatgaaatgactgaaggaaaaaaacagggtaattctaagaatttcatgtgaggccaaggtccattttgaaacccttttgaactaaacttttgcaggtccaacacatcttcaagatatttagtgggatcctcccagtcctacggtaccagcttgcattgtgaaggaaaatgaaggacagaataaagcccttctcccagtctggtttatttctgtacacagaacctctgaaaacaggaggccaaggctgacctctttagtcaagagtcagctcaactttaaaattataattgcatgtgaaagctaaaatgggaaagagaaaaaatcagttctcaggaccgaaatgctaaaaacccttgggtcacattccagttagggtcctggccgtgcacacagagctcccattgggggaaggtgggcaagagaccagccaagaccaattcaaactatagggtgttggggatcatggcatttattctagaagtgtccagtttacagataaaggaatgtactatagtgataatgctatataatcttttaaaaaatagaagcttatggtcagatctcattattgagaaaggtgccaaagaatctacccactccaagtgaactatttgcagtaaagaaatcagaggaggctgggtgcggtggcttacgcctgtaatcccagcactttgggaggctgaggcgggaggatcgcctgaggtcaggagttcaagaccagcctggccaacatggtgaaaccccatctccacaaacatacaaaaattagtcaggcatgatggcaggtgcctgtaatcccagctactcaggaggctgaggaaggagaatcacttgaaccagggaggcggaggttgcagtgagccgagatcaagtcattgcactccagcctgggtgacagagcaagactccatctcaaaaaaataaaataaaataaaatagaaaaaaaatagaaatcagagggatagagtctgtattagtttccttgggctgctgtaacaaattatcacaaactgggtggccaaaggcaacaggaatttatttattatttatttgggacagagtgttgctgcgatgcccaggctgaagtgcaatggcacgatctcggctcattgcaacctctgcctcccaggttcaagcgattctcccatctcagcctcccaagtagctgggactacaggcgcgtgtcacacctgactagtttttgtatttttagtagagacggggttttaccatattggccaggctggtctcaaactcctgacctcatgtgatctgcctgccttgacctcccaaagtgctgggattacaggtgtgagccactgcgcctcgcccataggaatttattcttacacagttctggaggttagaaagcaaagatcaaggttgtgttctcctggaggatccaaggaagaatcttccctgcctctctcctggctggtggtttccagcaatccttggtgtttcttgcttggcctgtagctgcataactccaatctctgtgtcggccttcccatggcattctcctctctgtgtctgtgtccaaatttcccagtttttataaggatactagatattagattagaacccaccctaatctagtaagtatgaactcatttttaacttgatttaatctgcaaagaccctatttcctaataaggtcacgttcacaggtatctggggttaagattagagggacaccatgcaacccacaggagtataaaacaaaaacaaaagaaaaccctgtataaaataaaaatacaaccaaaaccctgagttgggcatgggaagacctgctgaccaaccttctccaacccctttgggttgccctcgccctctctacgtcttggcttctccactctaaaggaaggttgtcagacctgccctactgacttcagaaatgccaggagaataaaatgaaatcatgtaaatggaagtattttctattcagaaaatgtttctttaagtgcaaggaattaagaattcattccagattgtgttgactttccttaacttcgtaattacttaatgaataggtaatggaaagagaaacacagcccaaccgggaaaaccatttaaattacatacctgccttcatttagggtttgagataaatgtccggtagcaatctgcagataaggagagtagtactgcagatccttgttcaatgggctttttactcacaccaaaacagggtggtattcaagtgaagctaaagggtggcaagcaatttaaaagcaaaccaagaggcctgatgttcacatctgggacatcagcagacggtgatggctctccttccctctgtatgtgaggtctataatattactgactcccataacaatatcctgatagtagctttgaatttgctttgtccgatgacttttctggatatggggacacagaccatccaatttataaaattagctaaagaagccactttcctgattgacaaatgtgacatatgcccatgtctattacacaaacagaaccactgggtagccagaaaaaaaaaaatctgaagaaaaaaaaagccccctttcccttcccttttttaagaggccaaaagttctagcaatgatgggaaaactcttttttaggccatcagattaagtcaatggggcttgaaaggcaaagacagccatatgcactgaaaatgccaaaaaaaaaaaaaagaggtgtcattgggataacaacttgagaactatagttatatccaaagcatcatgtgacctacttgagtgttactgatgaccatattagcaatcaattctgttgaccttagactgtgggggtttgctgacgcaggagaaatcccacaggggaaaaagagccccagcaaaaaagaaagaggccctcagaaagcagttcccaatctgccctacaaactgaatcctctatttctcactgctgggtgtatatgcttcctagtggctgtcatatactttcagaaatatgccaagtcacacacaacctaacaaacaaaactttattttcctttaatacaaaattaaatagcaaggggttttctttgtacagtgataaattagaaatttacagtacagacatcgatgcagacatacttttgtacatccttaaaagcagggtccatttcctttgaaatttagcaattcattcagggcatgtgtagcaggaagtttgcctggtacctctttgtcaaacatctgaaagtcccccagattggcttcaaggttcctggagctgtggggtggcatgaggacccaagaaaggccacagagcatccagcccgactgctgcacagagcaggggaagtcacattttatctttttttcagattacatccgatatttcatctacctttcttacaaagagctcaaggggccatcattttttgaccttttcaagcctcacaacatccctgtgaggtagacaaaattcagaaacacctccatgcctcactgggagagatctagaaagcagcttacccctcccaaagcccacagccaagtcagggccccagcctattagtacaatttgaaaactttcacaacctcggagagaagatggacccaacctttgtggcgcagagtggctcttgcccctcttttcagaagccttctaggatgacagtggtcatgtactgaatattgtaggagagcaaggaggtttaaaagctttgaggacatggctcatataggaccccaaaaaggtcctctacaaattgcctggggaaattctgggaattggctgatgcaaagaagaagagaaaaaaggtacatcagaaacagaaacatgctactatcagggcaactgagcttgccaaggggaagaggcatgtcgggggatctgtaagtcatttgtctcctggtactgtcaagtgtgtaatcaccgcacaagtgcatggcaagagacagcaacagaaagctctatgtaggctagagtgaaatgaaatctattatgtggggctccagtatctgatccttggtaggagcaaaatgctctctaaggagtttccaagatctatgatctaaccctggaggaaaagtgataacccaggtcatttgccagacataatacaaacccagaagggaactctaaactcaaataaaataaaggaaccaataggattttcagagtccagtgactcgacatgattgactggaatagcaactctctccagtgtcctccatcacagaacaaaatacaagacgtaaactgattttaagaggttccttccaggccaggtgtggtggctcacacttgtaatcccagcactttgggaggctgaggcgggcagatcatgaggtcaggagttcgagaccagcctggccaacacagtgaaaccccgtctctactaaaaatacagaagtagctgggcgtggtagcacgcacctgtagtcccagctcctcaggaggctgtggcaggagaatcacttgaacccaggaggcagaggttgcagtgagccaagatcgtgccattgcgccccagcctgggtgacagagcaagaccctgtctcaaacaaacaaacaaacaaacaaacaaacaaacaacaaaaaaaaggttccttccaaagtctgtgctcaatggctcccttccctaactgcagctgtggtcacctcaccagaaatcaaatactgcaccgacctggtgaaatccctgagtctattcctctagggctgagactgttgagctcatctttgtgtcctcaggtcccatcttggttctcaatacaataagcatttaattcagtgaccatgaggatgaggggagccagagagtatagagctaaaaggtgctgaacagaatctcaattcagtatctagacacacaagcttcccggaacctgagtttggagagtgcaggtgagacagtgacctgggagaggaaaatcagaaagcatctctgaaattaaaaaaatgtcaccccttctccagtttcaggcccaagtaagttgccagttcagcaacagtctcagagatcaggaaatgggtctccataaaggaaagaggatatgaatcaaccaagtagctcaagcagatggttctggccagcaccactctacccccatgttcccttgccctgaggtttggcctatatgaagcaggagaaaggaatctaccagaaaggaggttggacagaggtgccattgcaccatgtttaatctctggaggccaagggatttctgaggaagctacaatcatacccatttactgtaggtttcagagaaagaaaaacaaccctcaccttttctctagcaagatgctgtcctcaaatatacctatacaagtcacatggaataccccaagccctgaattgccggcaaagccaaagcagatgtgtgggcccatgtccttgtggcctactctcatagtcttcctaagggatttctccagagactgtcacgaagcagagctgatgctttctgttaaaaccacctgtaactgacttggaaggaatcctgggaaagggatgagagatgtgttaaaagtagagagacccaggctgggtgtggtggctcacacaggaagagatttatggaatggagacagtgaaacagatgggaattccagaggtccctgctcctttcccagaggaacagtaaagttcagcagacctgggtgcgtccccatcctagatcagttagaagaacagagattatctatttcagggctttactacagtcggcactcaataaataaaataactgatttttttaacaaataccgatttaagaagtgatggagttgattgaaggtcactggtaactgacccctcagccacaaagttcttttcctgaaaccataaacactctccattgtctggaatgtgaaaggagaggcctataaccctgtagcattgctaaggctactaatccaaatggccacttctgatcaaatacactttgccctgaaaaggcaagagatttgtggaaaaggcatgtcaaaacccaaagcattgtcaaaacactagctccagaactcaaaactcagaaatcaggtgcccagattcacccaagtgctcttttattgttattatttagtcattgacaagtatcgatcacctactccatgcctggctttctgctagatgctgccttggtcacacaatcactgacacattatgaagaaaactgcattacaaacctctatactctaacagcaagaccagtcccctaccgcctggtcttccttcccctgcctgggccagagtccctgcacaactcccaagacaccagagcagagcgtgagtaagggcaggctctgcccctgggtgcgtgctccagggccgtggacagttatgggaactgtctacaagcagcacagggagttcacattttacatttcataggcaatggagtatcagatggagttaaaatggttcttctggggatcaattctcatgctcctggagcctgacctagagtctagccaaggtactcagactgggcacagcagcaggggccacctgtgcccacttaacttcagtctcaaaagccaagactttgccttccaaaacatacaatcgactttacatgcatcttgatgtcagagagctcaagaaccacacaaaaacaaaaaggaaagaagaaagggaaatgtcaaactatgggcataaggctcaaaccaaatttttaaaaaagaggaaatgcttacttccagaatttgaccacctttttggaattttgagtccctggaaatgtttttccacaaagtgtgattgaaaaaaaaaaaaagaaaaaaaaaagcttcccttcctatttttttaaggcatgaattaataaataaatgtcattgcaaagcagttgctgaagcagacaggtatgagttacaaggagagcaacctgtgacatagtcaatttgtccccaagatctcatgattagaacgcctaaggcaaggtaagagaaaggccagttacagttttaagagaagtgcaattttcgagaggctgctgggggtacccccttgtgaagaacgtatgcataaattttaaaagctttggatacctctgctaaaggcaattaagacctgggctattagagtttgcagttcatttcatatggtctacactttattccctactaaccaatcaggcttctggctggcattctggagattcattaagcaccatataaatactccaggccacactgcctccagtgaaatcttacaaggagcctttgccaattactaggaaacaattacgcaccaagtagttggattagctgtcctcagttccctttataaaactgaaaaagtctccattgtcctaagtagaccagattctgataacattcttatgctttaaaaaataaaaaaatttttaaaggcactatcattctgagaatgcaagttgaagttgaccatagttttaaagtcagttgagtatactatgtcatggtccaacaatgtgcttttaattgtaattgacacacaaaaattacacagctaatctgtgtgaatgcaaagttgccaagaaacttaacatttcagctcttccagactggcgtctgcatagatgcaatcacacaagtaaaatatattaagtccccactgctcaatgcaataggtctctggggtccgtcaggtaagtcaacttagtaaatctcattttcctctgaattaagtgattgtcagaaagtgaatcacccttccttttcccctctttaagcatgctgcagtacaaaaattctataaaaataccttttttgagtcattaacataaaatgaagaaaacagcagcagccaagaagagagatgttgaaatttaagagaggaagacagagaagaaaaatccactggataccttatgtgtgtgagtacagtacttttgtttgttcaaataactgttttatgacaaaggcactgaaagattctaacaccacttcttgggagtgcagtccacaaagttctaaacagcagacagcgcaccacagaagatgtttatgttacatcagccaaactataaaactcttgtaacacttttctgaacccagcgtttccagtgtttatagattgctttgctatctgaaagacccagttagtatttaaaatggtaaagggttaaaaaagttaatatttctccctgctagttaccaactcacagctcaaatcccaccctgcaggggaaaacagtatcgccctggacttcctggaatctaggcaggacctccacgctccaagctgcaacctgctaaagtgatcaacgttttgatttttcacagctttgaaagcctctaactggcttttccattttggatcattccaaagtctgcagcaaaatcattggttttttgatgctggggtcggggtgggaggcagtgggttgacgggggtcacttaattgttgctagtttgttcaaactgagattcactgcataaaacttttagtagaatttcctccaaaatgctggcattccccccttcaaaatgaagaaagcatggaggctgactagccttataccacagtctcactgccttttccaggcttcacccaaccatttcctctcttctctctctttacctttccagaattcaccaatctgttggaacacttctgccacgtgtgaagagttttggcagaccaaatccacatgcctgaagtgatgcccaccaacaaagacataaaaattttcaacatttcaacagccatgttggaatcatctgcagaataccgaaaaagtgcccagttggagatttcataaaaataacaggcaatcacacacgttgcaggaactgtgtacagtactgagaacaccccaatcttgaccatcagtctttctaacttgtctgtctttgtcccatccttttgaagatttgaccgaattttgaacaaggccaccaaacctgcagcaatgaacaaagttccaatgaccaaataagtaaagaggggagccaccacgaacccggtgagggcatcgagattttggtttccaacatagcacaagccagtcagttcatctgcatccaccagtctcataatcaagatgacaatggttttcactgcggggatggcccaggctgcaatgtggaaataagagctgtgcatttcaatggcttcatgaccccatttgagtcctgctgccaaaaaccaagtgagtgtcagaataacccaccaaatggagctggccattccaaaaaagtacatcagcaagaaaattattgcacatcctgtgttcttaagtccttcttggatgagaacaggttctgctgcctcttcaaaatcacaggatatcctttcccggcctacagtcagcctgacaatataagcaatgctataaatattatagcacatactgagaaatatgatggggcgctcagggtaggaaaacctagaagaatcgatcaggaaggtcagtactgtgaaggcagtggagatgaaacacaggctggcccacacagccatccagatatcagtgaactccttggctgagcggctgtataagccagcatcatagccacacttgagcacacagttcaggctccttttcacccagatgtactgatcagaattggttcccacagagtgacactcttccccaggctggatgggggttttgtgaggtaagggcacctcttcatcacctggcccttccatgcacatgtggttgtggtcgttctgtggtgggaatttgctgcagttcagactctctggccaggcaaatccaaattccttcaggacgggttcacagcgtctcttgactgaaagacacatgccgccgcatgggccaatggggatgttgatcttctctgtgcacattggcacataaacagaacaaaggaagaactggaaaagtaacaaaatgaacacacacaaaaaaaacaatgacttggaagtttgaccaaatgctcccacaaagctgagttgaatgcttccaggcaatctaggtatctacttttaaaccaacctatcgggagtctgtctgtttactctgacctcaaacaagggcgcctgataatccatcacttacatacttttcttagtttggctttagtaatcctttccagaagaatgtacataaataaataaataaaataaatagggtctgaagaattgcataagccctctttgcacaacacttgaaataaatcttaaaaaactggctttcaatctccttccattttagaaactatttgaaaaagctaaagaaactaatatga

SEQ ID NO: 316 - DNA, 1733 bp, Homo sapiens
atgggagccgcgcgggcgggccccagagcgccctccccgcctgcccgccgcccgcggggtccccggggcccagcccggcgccggcccgcgcgcccccggcccccgccgccgccgccgccccgagccgggggccgcacggggggcgggtgcggggcgcgcgtgcacgtgtgcgtgtgcctgccgggttgctgcgccgcgggctgcgagtgcttgtgacccgccgcaccctcacccccgggcgcgccatccctgctccgccgccagcgagggagccccggagcctaagacgcccggacccgccgcctcgcagacccacccttgcccctgcgcctcgtcatccgcccgccccagccagcccgcgcagggtccgcggcccgcttttccgcgagaagccccctgtggtctttcctcgtacccggggactcggaccgagaagccgactgagcgaggtcgccgcccggcctcacggacacagagcgactctgcacctttcgcctccaggagctgaaaacattttgtcacttgtgcagtgtactcaccagtgcccccaacatcttctcccccgaaagcgctttcagattcgcgccgagatggggcgacgcggcggctcttgagcggaataacccgaagggccacgcaaactggggcttccagccgcgagcatgcggcggggcgcccagggcctggggtcgcgcgctcagggcctgtgctgcgccacgcaggaggaggagagggctggccctgccgggcgcgggtgcgggcccgactggctgaaggaggagtggggactggcttggaagtctccgaagcagaaaagtggggccgacaggatggaattgggggaggccgattttggctcagagagatttctctattaaggaaagcagtccaagaataggccccctggaagaggaatgcgctcaaacccagagggattctccttagagctacctcttgagattctgtacttcgaggaaattagaggtttttttaaatctctatttttaataaggtgggaggaggctgttgctcctttctcctcaacaacatgaaatgatcctgtgcctctatccaacaactctacaacaaagcactgaatacttccctgactggcactttcatggctgttcatgggcatctcttggtctatgacgacgatgttggagagttcctactccgtgataactcagttctaagtgcaagcagtcacgtgaaatgagcctgatagtctgcgaatgaagaaactaaaacgaactatattatatacttcataacacaagacaacgtgctcgtttgttcattctgcaagtaaatgcttaatgcttcctaggtggcaggctaaagaatatgatcattttaaagcagtcatgctttgaaaataaacaacccatcccagctgtaagctttttgaaagtgtacaaaatatgtaattgatgactccctaaatggtttgcagctttggtatttgactgaattgtaaaccattagttaaactacatttcagttatgctttgtaggaaaaacactttcctatgcattgaatgttctataactaaggagcttagtaatctactgctaaaaatctcactgaaatctccagtttaagcgatttaagcaatttacagctcttggcaaatatttgttttgggttataaaacactttttttctgactagtaaattgttcatgttctttgtttccagtaaaatgggaataaaggtttcagtactcaaa

SEQ ID NO: 317 - DNA, 40647 bp, Homo sapiens
gaaatgactactgtccggggcccgaggtgctgcctcgcacaatgcatcaaaggaggttgtgtccgtggtcgtaacctcttcgcgtgaaaggcaccgcctggtccagtctttgtgaaggaacaaaataagttcacttccttgggcaccgccacccaccctcagcaaatgacaaggctggagcgcagctcccaccgcacagttatttgcaaagtcccaggtgaactcgtggcgagagaaggaaaatgcgcgtcccgggcgcgggtaggtgcgtgtgggcagcggggaggcggccagaccctgacactcgccagctgtttgtcctccgcgtagcccggccccggccgcacacgcccgccccctccctgagacccccagcccgccgcccggccttttgtccccaacccctcggccgacttccttccccgcggccgcacccccgcccccaggccggaggcgcagcccagcccctttcccggtcccctggcgcccccaccccaccccagcccagccccaagcccagcccccctcccccagcccggcccccaccctttccccctccagcggttactgctaccccggtgcattgtgggcgcacggtccgttgttcatttgccattcgacctccgccagggcctggtcggacggaaacgctccgccggctttattgtcgcttcgttatgtggcggagccgagcagtttagcgtgcctctcaccctcagcgcctgcgaagccggcggcggcgtcgggactcctcggcgcgcggaggaaggatatctgtgtggaggatcggtgtgtgcgcgcgcggctttaaagagggggcagcggagggtctccccgcactccgctgctcaacttcgaaggcctcgctcgctgcaggctcgctcctcacctctccgccgcccgcccccttctccgcgcgggacgctgcccggagcgcggcggggcgggggtggaggacgagagagcggtcggaggcgtcggcccggcagcggcagcggcagcggacgcgtgcagcagacccgggagcgagcgcgagccgggctgccgggcgagagggcgaggccgagccccgcgagaccggaacgccgggggcgggggcgagacagagggggagccgcggggagcgcgcgggacgcggcccgaggccgtgcgcgagccggggcaccgggcggcggcggcggcggcgcgcgccatgtcgttcagtgaaatgaaccgcaggacgctggcgttccgaggaggcgggttggtcaccgctagcggcggcggctccacgaacaataacgctggcggggaggcctcagcttggcctccgcagccccagccgagacagcccccgccgccagcgccgcccgcgcttcagccgcctaatgggcggggggccgacgaggaagtggaattggagggcctggagccccaagacctggaggcctccgccgggccggccgccggcgccgccgaggaagccaaggagttgctgctcccccaagacgcgggcggccccacctcgcttggcggtggcgcggggggccccctgctagcggaaaggaaccgtcggactctggccttccgaggcggcggcggcgggggtctcggcaacaatggcagtagccgcggccgccccgagacctcggtgtggcccttgaggcatttcaatgggcgagggccggcgactgtggatctggagctggacgcgctggaggggaaggagttgatgcaggacggcgcgtccctgagcgacagcaccgaggacgaggaggagggggcgagcctgggcgacggcagcggggcggaaggcggcagctgcagcagcagcaggcggtcgggcggcgatggcggggacgaagtggagggcagcggtgtgggagctggcgaaggagagactgtccagcacttcccgctcgcgcggcccaagtctctaatgcagaagctccaatgctccttccagacctcctggctcaaggactttccctggctgcgctattccaaggatactggtcttatgtcttgcggctggtgccaaaagacccctgcagatgggggaagcgtggaccttcccccagtggggcatgatgagctttcgcgagggacccgcaactacaagaaaaccctcctcctgaggcaccacgtctctaccgagcacaaactccacgaagccaacgcccaggtacagtatatcctgctcctacttttttgagatcttttagggaaaggtttatcagcactcccttcacccccacccacccccgaaaaaaaacctcaaaaccattttcctgggtgaagacatcgttccagttgagaggtgcgggaagcttaggcgtgggggtttagaaagcctgggaacaagttttataaaagttctgtatgtgttgtggggggaaggggatggaatgacaattgtcgtggcgctggattttcttttttatgactcatttcttatcagattgaatcaaaaagaaagtgaggttgaaggttttaacctaaaaggctgactttgcggtaaaaaaattttattagctgtgattttagagaagctggtctatgctcacagacgtttagtgtgctggtcgaagtcaaatcgggcaactctttgaagaatggattaaacagtttacctttaaggctacccctttcaggaaaacgtccagccgaaaaaattctttatatgaaatcaaaataatgtcaagtatgagagcagtatgtaaatgtagagaatgctatttggaattccttgctcttgtgaataattttactaaattaatctctgttgaactttcttactacggcttggttttggtaaattattgtagtttttacttgtttacttttactcagatttttgtgctgagatttctttttgtactgttccttttcagaaagatttttaaatgcagtttccaataagtactttaagcttagcattagaaatgtttaatgtgtagttatttgtatcaagtagtggatttggattggtagggaatttatttaccaaacaccgtgaaagtgcttacaaaacaagtaagctgtattttagttcttagtccttgttttaacatttccagtctaaagatagtaagccttactattttgataatctgtgttcaagccaaacagatgttgatcagtcctcctttttgactttaaggcaacctgtggtggtggatggaattcattctttcgtattggttagccagtcgttgattttataaagttagctcttagtattctgtttattggaatgattctgccgttcagcacacttaccctggggttaattaggcgcaccagtaaccccacagacacagcacccatgtttctcagaagttagggctttaactttaaagcacagggtgatcccccgcccccgccccagtggacaatgtagtagggtttttgttgttgttttgcacacattttagttgcctaagccctagaaggaaggtcatttaaagatacaaggccgagaaaggttaagtaaatagtcctaagagtctggggtgacccaactgagactagagcctgtaaggaatgtcgtaatggaaaaagaatggatttggagtaaatctgggttcagatctcagctttctgcaattaactagctttgtgagcttgggcaatagagtgaaatggaactaacagctcctggttttccgtgtgccaaacacatttattctgcaaagtatttattttttgttcccattttacagaagaggaatctaaagccttaaagggttaagtaacattcctgaagttatgtagtaagatgatggagttgcaagggacttgtgaaaatgaaagtttaattttccaaatagggctatgttggttacttagaaaattttaaatgggatgaattttcttaatcggctgtggaccaattcctctttatcagcatagtctctccctgtaggcaaatctgaatgggaatgcaaattataattagctcctttagtgaacctgaaatcagaagaaggggcattaattggataaccttaaggtagcctcagcttgagtgtattcttctcctctgggtatgtatctgcgtcttggaattcctaggaaaaacctttctaaacttgacccgaactacgactctcttcctcatcactcctttaaattcccccatcaatgtaatctgcaggccatctcctttctttgggacattctatacaatatacatatattaagggctacagttttagtaagtcctgtgtgtcctaaggttatatattggtctccttgattggattttgggtgttttcactttgaattgatcttaatcatttattactttcattataactaatcttgaggggatatcttgttatcaaccccccaggtaccacctatataaatacctgtttgtcttaacatgagtaacatgagtaacaggttcctgatctcttttgggcagagtgcaatcattttgtttttcgtttttcttcagtctccaattacctataggaggcagtataacacaacacgtaatgtaagcgcctacttgggcttaaggtcagaggactttgctcttaaatctctactttttaggcaggcaaattagttaacttctagtttcgttatgtatgcaaagtatatgtgccagcataaaaccacttagtgccgttatttattatcattattacctttttgttttgtttttttgagacagtgactctattgcccaggctggagtgcagtggtgagataaaggctcactgcagcctcctgggctcaggcatcctcccgagtagctagaactacaggtgcgcgccaccattcctggctaatttttaagttttttgttgaaacgggagtctcgctatgttgcccaggctggtctcaaccttttgggctcaagcaattctcccaccttgacctccccaaaatgctgggattacaggtgtgagccactgagcctggccgttattactcattttgatcaccaatcagttctcctttttataccttcagagactttgtggccatcaggttctttgaacattctgagcctatttctcatacatgcagtttttctcagcttcacaaagacactcttaatatcttgtcttaaaaacatggaaatgagagttttagaattctttaggcaagaaatcactttgagtctaggagtactaaactcctattttcccaattatttctcaaagagtcccgtttctgagaggaatttggccacatcttaacacagtcatgtactgcatgacgttctcaaggatggactgcatttatgataatggtcccataagattatagcggagctgaaaaattactatcgcctggtgatagcgtaaagttgtagcgtactttgttttgtaatcccagcactttgcggggccgaggtgggtgaatcacttgaggtcaggagttcgagaccagcctgaccaacatggtgagaccctgtctgtacttagtgtagcctaagtgtacggtgctcataaaatctacagcagtgtatggtaatgtcctaggcctttcattcagtcaccactcactgactcacccagagcagcttccaggtatgccagctctgttcatggtgagtgccctataaggtgtgccatatttttactgtacctttttcatgtttagatagattagatacacaaatactattgtgttacagttgcctaaagtattccttacagtaacatagtgtacagatttgtagtctgggagcaataggcccaaccatatagcctaggtgtgtagtaggttataccatctaggtttgtgtacgctaaggcacagtgacaaaatcgatgcatctctcagatcatatccctctcgttaagtgatgcataactgtatgtcatgaaaggttactttcctctaagtaagaaaagtatctttttgttaatcccttggtagttaccaaaaagttaatccttctgttaattggaccttggttattgtggactgttcatgggaaagtcttttaaaacatgctttctgagtctgtgttttgagccttctatttccgaggtgtccctgtatttataaggatgtgagggacaattaatagtttaattttgagtaacaattgactacatcgtcagagtcaggtttaatgattagctcattcagtatctgaccatttggcccagaagactttaaaattccttaataacagtgattaccagttattcttggtttagaccactttctacctaattgtgaaattttcatagcctaaatcacacatcctgtcaactcttcctgggagaaacatgcatccaaatgtattattgttgtaaatttagttaacctttacagaaactaagtaatgaattcagaccagtgatctgattgaaatttccagttggaatatattgatgtcagtagctgagcaaacaaaagaatgtaaggcagatctatcagcctaatttgtttatggcagaaataagggcggaaggttggttggttggttacttggttggtttttaacactttaggaagaaagtctgaaagacctttcactgaggaaaaatcgattagagttgagcctgtagcccattaaattccgttgtttcttatttatatattttacattatttataatttattctttgtgttttattcagtaacagctagttcatagcccttgtgcttttcaaacttgttagcagtgtctgactgtataccttattgtgtacctaggattagcttccttctccatcttaaatttagctgtattaggttggcaaagcactggagataaaaatctgtatgttttgttaacattcattctctctgccctcaaggaacttgtagtttagtaaggagagacagacatgaccgaaaaaagacacagataacatggtagcagtatataatcagggtacattgaagaatttttttttttttgagatggggtctcacttgtcacccaggctggagtgcagtggtgtgatctgggctcactgcaacctccgcctcctgggttcaagtgattcttctgcctcaacctcctgattagctgggactacaggcacatgccaccatgctaggctaatttttgtatttctagtagagacggggtttcagtatgttggccaggatagtctctatctcctgatctcgtgatctgcccacctcggcctccgagagtgctgggattacaggcgtgagtcacgcacccggcctgaagattcttaagggagtgatcagttctacctgcaaaggttggaagaagcttgtacaactgattcttgaattttaattgcatttaattaataggtgttgaccaggatggggagggcatttaggcagtgcaattagaaacagcctaaggaggagccaggcgcagtgagtggttcatgcctgtaatcccagcactttgggaggccgaggtgggtggatcacttgaggtcaggacttcgagaccagcctggccaacatggtgaaaccccgtctctactgaaaatacaaaaataagccaggcgtggtggcaggtgcctgtaatcccagctacttgggaggctgaggcaggagaatcacttgaacctagcaggcaccccactgcactccaactggggcgacaagcaagactgtgcctcaaaacgcgcgcgcgcgcgcacacacacacacacacacacacacacacacacacacagcctgaggaaagtgaagaatggtatcttagagaagggagagtttggttgctgtgcaggatgaaaaatcaagtttgaatagatagactggaggtcatggaggatctcttgtcatgctgaaaacattaaattttattgtcttaacaaatgggcaacaatagcagttttaagcaggggagaatcattatcaaatgtgtatgtgtttcaatctagaggcacctgcgtagtgtgtatgtgggtttagagtttgaggagagaactggttggcaggatgttataataacctgaataggccgggcgcggtggctcaggcctgtaatcccagcacttcgggaggccgagggggatggatcatctgaggtcgggagttcgagaccaacctgaccaacatggagaaaccccgtctctaatttaaaaacaaaacaaaaaaaaaaaaccgagccgggcgtggtggcgcatgcctgtaatcccagctactcgggaggctgaggcaggagaatcgcttcaacgcagaaggcagaggttgtggtgagccgagatcgcgcccttgtgcttggacaacaagagcgaaacttcgtctcaaaaataaaaaataaaaaataacctgaataaccatcgtctgtctgctccctaacactcacaggattagaatttctggggatagtacttaagctaccaaagaggatgccatcactcagagatatagaggtgatcagaaaactgcaaaagagaccttcttgtctttttctctaccaactgttatgatttgtcattgccactagcatgtatttggcaaaacttgctatggccttgtttgtcttccttctataaaatgaatttgttctaaaatttggaaatagaaattactgtttttgttctttcagtatattccagtgggttgctgcagagtaatatttttatgttttcaatgcttttagtttacacttaaatgtttgtgttggaaatgtcttttctgctaattcagttattggaaaagggctgtaattgagtagggtagtaaatactaattgcttgtttctttaactgaataacattttcctattgttaacggattgactacaggtgtgctgtttgactttctattacttgtaactgaagttagcctctcttcctctacccccgcaaaagtgtaggagactgggtgatggtcttgtattctctacaagttggtggcgttgtttaggccccaagctggaatgctgatgaccctatgattctctccctccaccctttacatctgttttatcatgcaagttctgatgatttttagactatttttctaggctctgcttcacacctcattgacacctatcttccctaattaaggtcttttttttctggcatgtatgttgccctattaacagtagctttccagagggtacatggctcacacctgtaaacttagcactctgggaggccaaagcaggaggattgcttgagcccaggagtttgagacaagcctgggcaacacagggagactcttatctctacaaaaatttaaaaaaataaaataactgggcgtggtggcacacatcttatagtcccagctacttgggagactgagacaggaggatcccttgaacccaggaggttgagggtacaataagccatgatctaaccactgcactccagcctgggtgacagagtgacactgtctcaaaaaaaaaaaaaaaaaaaggaaaaatagctttccaactgatcacagtatctgcagtcttcattccctgataataaatctccaccttgctgccataggcatctctcctctttgctatttcgattatatcactgcttctgaaaactctgtaaggtgcctatagcaatggttctaatatttgggagggagaaggggattcaaatctctctctctctttttttttttttttaaggagatagggtttctctatgttgactgggctggtcttgaactcctggctaccagccatcctgtcgccttccaaagtgctgagattacatggcgctcttgtcaaaatggatggacatttacctctgaaatgtgcccaagtgcatatttgcattccgtagggctttttagaaaatcacattgaagttcttttacaaatcttaacttttgaggatgctatagaccatcttatgtttttttaaaatgctgggtttttgttttgttgttttttttttttttaaatgccgtcgcatttacttgaagtgctcatccacccatcccactcttggatcctttaaagctctgctcaggtcttgtttcttcgaaaaagcatccccacactttaaaaacaaaaaactggattagatacacatgctttctgctcttataacaccttaagagtcttacccactaacagtaacttcaaattagcaactgaatcattttgcttcctagtgtagaccctggccaaagtaggtattcatttaatgtttattaaataaatatgtaaagttaggacttttcaagcattttcctttgagtaaaatatttactattttgtagcctatgttctggaaatattgaacatctagataataggttataaggattttaactaactggacacttacctatattttctaaattttggaagacttgatattgaggtctcatccagactaaagttttactaaatggcatctttacaaataaaaaaattcaagatttcatatttagctctgaatgtctgtttctttaaaatctccttgtttagccagtttagactaatgtctgagctaattgtgttttcctttttgggagagaggttagaaaaggtcactacatttgaaaagaccagttgtggaaatagtaattttttttaacttatcagtgatatctgatgttatcagtatactaaaagtggacatagaacgttaaagaaggaaccaaagaggcaaagatacctggagttattagggacctattttgagattttgtctctggcactaagaatttattaatttattgagtttagcaaatgatattggcagtttattttagtgctttgtgcttatttagctctttaacccaaatcctctaataatgatctccttagagagtacacatactcttggaaatgattcattttttttgaaggtcatatttatttatgtggtttcttttttttttttttttgaagggcatatttaatagctgctgcaaacatatggaatagtgctttaatcagtggtgaacaagaaattgctgttgttggttataaaaacaagggacattaatgttcttgttcttgtaccatagtaatgagaaaaaaaaatagtggttgaatggtgtttaatttgtacagtttgtgtcaaagtagaatgggcagatattttggtggataggcttttgtcttagttataaaaattaggacatttggtatgataaaggcagagaatcttaacaattggcactggcccagaaaattcagggtgcagtgaccatagcgtgttatgactgctacagtaggcatagccacctcctgaagtgttttcaactgcttgatatacggactttaggcagttcttgacttgtacatgctaattcactgcttccacaaacagttcatagatatatgctgccagatatttagtgttgaaaacttttgcttcttccaaatattcatacaatattcatgcttttactataatatatagtagattgaacactgaaccaaatgagcttgggttcaggtacagcttgtgtaacaaagcttttagtgttgggcctgtatcaaagcaagattcttcccccttatttgtaatttctatagagagcataggcaaattaataaaatttactcagtctcaaaagggaaaccaagtaaacagaatgatgcttttgtggaaagttacactgtccaagtaattgttacaggtgtttttagtatcattctttacattttcacacaagtcctaaattgttcattcctctttgctacatgatacgaaatttcacaacatactggttttttttttcttttaaccaaatatttgcagtaatccaatacaacatactggtttaatacaagagcttaggttaaataagtctcattattaccttatttcctttctccagttccccaaaaacaaaaataagggtattactcatgaatggacttgttttgattcctctatccgtgacttaacagtttttgcagaattggatcttttggtaggaggagaaaatagctaatttagagcatggaacattattatatggtgggggggggcatgggtgggagttttttggtataagggctttatgcacttggcacaagaagggtatgggaaggttgccaaggatcagtcaaaaatgaggaaatttctctactttgtgtgcttcattctgtagtgatcatatactccagattcgtagagtttttcatactattccattttcacagtgaaacagttgaagtgtgtcctggaatctttttttttttttttttttttttgagacaggtctcagtctgttgcccagactggagtgcagtggcatgatcttggctcaccacaacctctgcctcagcctcccaagtagctgacattacaggcgtgccccactactgcccagctaatgtttgtatttttagtagagacggggtttcaccacattggccaggctggtcttgaactcctgacctcaaatgatctacccacctcagcctttcagtgctgggattacaggcgtgagccaccatgcctggccatgtcctggaatattatttgggttctttcagttgacttctcatacctgggagcagcactataatttttagatggactgggttagtttcagagaattgagatgacagcgtctgtggcctcctgtgacatgcacccaagtaaagctaaaatttttatgatttagccatgcacatgattgcattaagtcatgtttcgtgattgtttagggatccaccatttaggatattgtttgtgagactacttttgcagtctcgtcatctctacaccactaactctcttctaagcatgtcagtactttgagcctgtttacactctagtgtttatttctccatgtttttctccatgctcgtaaaatcatagatccatacatatgtgtatatattttattattttatagaaatggtctatgtttaacttaatattttgtgccaaagaattgacacttgaataaggtcagtattttcagttatcttttctactagaaatggtctaagcaatttttctcttgggaaagagatgattacttcatttgtttagcaaagtgtggcaggcactaatcaaagtgctggagggatattcagctctgccttgagggagcttacccacctagtcactgtatgaggaaagtcataaagttttaactaacatttgtaatactgacttatcgtttaaggaaaaggctcagggatagtgactttccaaggacacgcagttaatggctgatacagacagcattctgaattctggatcatacttttattcttacgattatatcacataattttaattgtgacgccaagtagaactataatgaatacctgtatgataagaagcaaaatttataaacatttagaattttgaattcaggaattttaatttaccttacagtttatagtacttatgaccctaaagagataaagcgttttgaaagttgataggaaattatataactagatattcctatagttgaagcaaattttccccttagggtcttacctttatctctagttagatttaattaacttcattgacctaaactgtttgattttaatgtttgccaagacttaaaatttacctttttattaatggtagatagggtgatatgcctagcataaaatataacttggatattttaagttcaatcgggggagactgttgcttttctatagagataaagcaaacatttaattcctataagagaaagtttcttttcttaagaaaataattgctctttttaattttaattttaagaaattctcaattcatgttcttagcttatatttgaaacatataacatgatgaatgttatttttaaaatgaaaccctgctgatcttcagtcagatgtgtttgatttttttcttttttaataatagcagtgggttgcaccaccactgttcactccatttcttgattactcacaaattaatatatttgattatcgctttttaaaaacttgataattgttttccttggtttgggagtttttaaaaaagtcaataaagtttaatattaatgttttttatccaattacaggagtcagaaataccatcagaggaggggtactgtgactttaatagtaggccaaatgagaactcttattgctatcaacttctgcgacaactaaatgaacagagaaagaaaggtattctttgtgatgtcagcattgtggtaagcggaaaaatcttcaaagctcataagaacatcctggttgcaggcagccgtttctttaagactttatattgcttttcaaacaaagaaagccctaaccaaaacaatactacccacttagatattgctgcagttcaaggtttttcagtcatcttggacttcttgtattctggtaacctggtgctcacaagccaaaatgccattgaagttatgaccgtggccagctatcttcaaatgagtgaagttgttcaaacttgccgaaatttcattaaagatgccttaaatataagcattaaatcagaagctccagagtctgtagttgtggactataataatagaaaaccagttaatagagatggtctgtcttcatcacgggatcaaaaaattgccagtttttgggcaacacggaatcttaccaatttggcaagtaatgtaaagattgaaaatgatggttgtaatgtcgacgagggccaaatagaaaactaccaaatgaatgacagtagttgggtccaggatggatctcctgaaatggctgaaaatgaatctgaaggtcaaacaaaagtgtttatttggaataatatgggctcccagggaattcaagagactggcaaaacaaggaggaaaaaccaaactacaaaaagatttatttataatattccacctaataatgaaacgaatttagaagattgctcagtaatgcagccacctgttgcctatccagaagaaaatacactactcatcaaggaagaaccaggtaaatattatctatacaaggatacttccttgttcatcctaattctagttggatataatcttgaagtatatttttaattgaattattttagttataaagtaatactaaagttgtttacaaaagaagggggaacgtcattcaaatgcataacatatttggtatattttctttgtcttttttcaacacatatatatgtgggtttatcaaaagatgtattaatagccaggtattgcatatattgtcaaggaacgtggactctgctgcatgtacgggtctttgactttcctcatttttagcctctgtgctcactattttatacccagtgttgggaaagatagaatctttagttgtaatatataatcactgtcgtttcagagacccccttaaccttttttattttatttttggctgttaaaacatatttaagtgtttcaaagaattttgccaattatgagattatggtattctagtttgtttagggctactgttcttctgttattttttgtttatttatttttttgagtcggagtctcactctatagcccaggctggagtctcactgcaaactccgcctcccaggttcaaacgattctcctgcctcagcctcctgagtagctgggactgcaggtgcgtgccaccacacccagctaattttgtatttttagtagagatggggtttcaccatgttgtccaggctggtatggaacccctgacctcaggtgatctgcttgcctcggcctcccaaagtgctgggattacagacatgagccaccacacctggcctagagcaggtactgttctgttctcaccatagaagctattttgtttgtccactgtcacctgattttcattcacctttgcattcattgcaaagcctctgaggcctttctcttcaatatatttctctccaaaagttccgtaggaatcttagagaatcacatttacagtgggaatttttttaaaacgagaagaccattgttaagtctttagtttaatctggctgtgcatatctttatttgaagaagctcagtgggtttgaggtttcctatgcatgcctgaggcttgtccaccactgtcatacattatttaatgcttgtttttttcacttcaaagcactgtaactgttcagtgtctgatttatacgatggtggtcatctgaggatggagtattttctgttaaaggaatcactgtttttagttgccagagggcaaaatgccatagtaatcctgtgaaatgttcctctggctttttagatttgggttagctttcagtgataggaattttgtgtatgtatgtgtgtgtgtgtgtgtgaaatttttactgtgtgaaaaatcaagtgtgtatatataacgaatactatatatctttttccttgtactttatatcaagttttaacaataaaatccctgagacaatttagttaaatgaagtattaagggtagatagactccttagctagcactttgttttgtcttaatgtagaagaccttgacagatttctcattagagctacgttgtctttgtgctgtatggattatttctgtttaacagtatggtgggaaccctgtagtgtttttaaatacacacacttttccttaaaggaataaataacatcttttgggtgtagcggttgtttgatggtaactagtcagcagtaacctcatttaaaaaattaatgccacatataattggagtgatttaaagaaaagcattaataatgaaccacaatgcatactttcaaagatgacattactagcaatttttatcaagtatctcctagccatggttgtgttaatggactagttctattataaattaattggtggtctaatatgctttatctcttacatctgttttgtttgtttgtttttaaacggagtctcactctgttgcccaggctggagtgcagtggcacagtcttggttcactgcaaccactgcctcctgggttcaagcgattctcctacctcagcctcccaagtagctgggattacaggcacatgccaccacacctggctaatttttttattattactagagacgggggtctcaccatgttggccaagctggtctcgaactcgtgacctcaagtccacccaccttggcctcccaacatgttgggattacatgggtgagccaccgtgcccagccgtctcttaaaaaggattattttcatttcattgataccagtttggtatccgaaccttgcttaactcacaaatttggttctatccatgccaccagtgttatttggtggaaaaaataaatgggtctcaaaagagcattatggttagggtatataatatgatatagaaccaaggactggtaaatttttactgtaaagggctaaaacagtaaaaaaaaaaaagactttcacctttgttggtcataaaagtcagctcatcaactctgccacttgtgacatgaaagcagtcatttgtactatgtaaacaaatgaaggtaggtgtgttccagtaaaacttgccaacccttcgtatatagcagtggttcttaatcatgggtatgcacgttggtatcacttgggagcattacatgccgtaaagggtctctcttctgtggattccaatttaattggtatggaatgtggtttggatgtggaattttttttaaagttctacaggtaattttatgagttaaggctgagatcagcaaatattactatattggaaagagcctaaattgagtcaaacataatgaatttaaaatttaaaaataagctgtgccacctaccccctgtagtccatgatcaaattaagctcttgtcctcagtttcctcattaaaatattgtgttgattttatagaattattatgaaaatgaagtgacaaatatgaaataactcttggtcatggcaatcctccttaaacttggaaaagactattgaggttattcatatcagttttccggtgctgtgtactttctaccaaatgccagatagatggtcttagcctcagcttgattttttgactgcttgtaaagacttccctaagcagcttccagtgtaggatgactgattattaggtagtcattttaaatgtagccaaaatttgcttctctataacttcctaattctgtcgttgggaatagtgtaatttattatttatttatttatttatttatttatgttttttgagagacagagtctccctgtgtcaccaaggctggagtgcagttgcatgattttggctcactgaaacctccgcctcccagattcaagcgttctcctgcctcagcttcccaggtagctgggactactggcgtgcaccactgcacccagctaatttttgtattttgtatttttagtagagggtttcactatatgttggccaggctggtctcaaaaactcctgaccacaagtgatctgcccactttggcctcccaaagtgctgggaatacaggcgtgagccactgcgctctgcctggaatagtataatttaaacctaacctaattcctctaatctacctgataacccttcaaatgttagacgtttaaagagtcctgtttttgtaggctatgtgctcttctgcccatcttgtgatgaatacacacaatttactctttccaggcaagttctgaccaatatagaacatagcctgtgtttaccaacgttaaggccttcccaaggtcattcagctagtaagagtagaaagaggcaggttgcatatttaggactatgctgcatgaaaaccttgaaattaactactaaagtagtagattcctatcttttttaaaaaattagttccttttaactttaaaatatttttatgatccccttcatcattagttatgctttaatttccatttattgagaaaacagttgtccatgaaataaatgcttttaaataaatttgaagttctatagcaaacatctgaaaagtcttagtgaattgttcaatctgcaaacaatgcttggcatgtttggatttggcgggggtctcttctagttactgtgtcttccctcaggtcttcagcacagagtttgtaagatacagttctaataacgctgtcttgtataatgttgaagcttttgtttgggtgccttttaaagattgagataagaaggtgtacccatagctgcagggtttttattcagatggtatttttttatcttgaaattaacatatttgttgtttgactcactacagagtcatatttgttgtttgacttcacttcagatcatttcttttacacaagaatactttgaaggtagaactcagaaaagttagaaatttctgtcctaagagaatatgcacatactgggattatggaataattaaaactgtcagcaaaaactaaaatctgggtaatcaaataagggtaaaaatgatgtcgtgagtgaattgctctgataatgtaaaaatttcaaaatccttgtcttgctgatttgcaaccaggaaacattaaattttagccaaataaagtagataacctgagattagaaattgaattacagaagtacagataactagtgcctaaatttgttttacaacgtgtattcacacatgttgtgtcccgtttaactagaacaagtcaggtgttaatctgattttttaaaatcactttattttgcgggctcatggaacatggttttctgagcctagatttttaaatttatacctgtcatactagcaacttctacctattataaataattttactctgtatgtacgttgcatgcatacataccttattttgaaatgacaaaagaaacaaattagcaaaataaagtaaaattggcaaagaagttaagagtgctcatcatggatataaatgtggttgccctaattaagcttttaattggctctaagatacaaaacagccttactcaaaagagaaaaacataccagttctaccaggatgacaaacttcctggtactgacttctgaaaggaatttctccagtgggatttttttatgtagttgacaccaagtaatataatggacagtttccttagatgttttctagtaaatgcagcagtcgattattatatttttaatctttgccacaagctgatgtagttctatgtaaatgattttttttccttatgccatacgaatactcaaatgtaaggtaattttagttgattaaaagataaagtttagaattcttttaaataacctggaagtttctttcacctagacttatgatggaaaaatagttttgcagcatttttaggtttgcgttaatccttacaagtagagttgaaatcaggtttaagctttgcacttatttgtgtaattgcttttttggtaaaaaagcatacaatttggtactttgaaaactattttgagaaaagaatatccaaactagatagatataagaaatcgtaataaggcatatatttgaggcagagtcttgctctgtcacccaggcggagtgcagtgtcatgatcatggcttacagaaacctcaacctcctgggctcatgtgattctcccgcctcactctcccgcaatcagccacacagagtacttggaactacaggtgggcgtgcaccactatgcctggctaattttttttttttttttttttttttaagtaaaggtgaagtctcgctttgttgccaaggagactggtctcaggctcaagggatcctccagcctcacttcccaaagtgctgggattacagccttgagccactgtgtccagtctaaaatatgtttcaaaaccatgggacatggctttggtgaaggagacttgggctttagattcagttttgccacaatgctagccttgagtgtatcccagacagcctccctaatgggaaagaagtaaaatttctaccttaaaattctgaaatcttaatagttctgaggacccaaagctttttcttaatcattttggcaacaaatcagctatttatatttttttacttccttaaatgtgaatattcatgggttttttttctttttttcttttttctttttttgagatagagtttcactcttgttgcccaggctggagtgcagtggcgtgatcttggctcactgcaacctcacctccagggctcaagcaattctcctgcctcagcctcccgagtagctgggattacaggcatgtgccaccatgtctggccaattttgtatttttagtagagacgagacgggtttttttcatgttggtgaggctggtcttgaactcctgacctcaggtgatccaccccccccccaacccccgcctcagcctcccaaagcgctgggattgcaggcgtgagccagcacgccctgcaaatattcatgttttattgtataaatattagtgttttgtataaatattcatgttttcattatagggtgctactccagaccccacatggggtgttacagtcatagctataaaatctgaaaaattctgcattctaaatcttaccccaagggtctcacgtaacagatttatggatctgaattagtttttattctcttaggagattccgagtgttttgctaaacctcttaggcatcctatggagtatgctatgaaggatgagatgcaagtcagaatttaatttcatttttcattagcaacttgggggggttctaataattagggggagggtgctgaaggccagatgcttacttatgtatttatttattttattttattaagagacaagatctccctctgaggccgggtgcagtggctcgcgcctgtaatcccagcactttgggaggccgaggcaggtggatcacgagggcaagagatcgagatcatcctggccaacatggtgaaaccccatctctactaaaaatacaaaaattagctgggtgtggtggcgcgcgcctgtaatcccagctactcgggaggctgaggcaggagaatcactttaacccgggaggcagaggttgcagtgagccaagaccatgccactgcactccagctgggtgacagagcgagactcagtctcaaaagaagaaaagaaaaaaaaaacagctgggcacggtggctcacgcctgtaatcccagcactttgggaggccgaggcgggtggttcacaaggtcaggagatcgagaccatcctggctaacacagtgaaaccccgtctctactaaaaatacaaaaaaaaattagccaggcatggtggcgggcacatgtagtcccagctacttggggggctgaggcaggagaatggcttgaacccgggagcagaggttgcagtgagctgagatcgcgccactgcactccagcctggggcacagagccagactccatctcaaaaaaaaaatctccctctgtcacccaggctggagtgcagtgatcatagctcactgcagcctcaaatccctgggctcaagtgatcctcctgcctcagcctcctgagtacctgggcacacctacaggcatgggccaccactcttggctaattttttttagatttttaaaatagagacagggtctcgttatgttgcccacactggtgtccagctcttgggctcaactctcctcctgcctcagcctcccagagtgctggggttgcaggcatgagccactgtacccagccctgatgcttatttttaaaaataaataatagttaatgagttatatgatatactaatgcataagaatcttcagtatttaattttaaaagatggtagtaggcaaccatatggtaggtgaaatagtagtctgccactgtttccccttttgctgtgcttactgttgctttccttccctgtatcatacttgacccaagaagtggctacactgttgattattacctgtaagttagaaactctttaagtggtcagaataaagctgaagagctgaagaagtcttatgtgggtcagttaaggcatttttgtgacttcttcctgctgaaggtgttaagttgtctaaaccatataaatgccagtccctgaaagttttttatagaactgaatttttggtttctgatacagacttaatatatagtagggtgaccagatagtgtaaattttcattcaaagctttactcttcagaaatgttataactttctgggaactccaaaatagctttccacatataataggaaatttggaaacgtttttatttaaaatctaaagacactgagcaataggccacataatgtcaagattgaggagtcccttatgcggaacttattcacaatagggtgactgtggggtagaaacatactcagtgccatgtgataaatgttaaaattagattatttaagatgcatgacggggtgcagtggaacagtcctaactgcccagaggagttgggaaagcttcatagagaaggcagtgtgagtggatcttttgttatgtaggagtttgctaggaggggaagaagagcattcgttgacttgcaagatgggaagaaattggaataagtgggtcgaagaatagaaaaggggtagtgttgtggggacatctccaatttcctactaccttgtctataggtataactagttatttttgtattgtaataaattctgacttgttttacagactctgaagtagtgagtggtttttttaactagagatttgatctgtttatattgcatttaagactaaaaagtttaagagcatttttcatggattggaggtggggcatgtactggggggacctgttagggagaaataacagcactttggaataatgcaaggaagaaacagttgagcctagtctaagtaagatggggcagtcacttgtcaatgagtttgcgagtgaaagggaagctattttgagtttaaaaggctgctacaggaactgtaaagggtggtttatataatacatttgcaactgaatttactctccactgaaaggagaaaactgaagagaaaaaatctatacctgtttatgggggggaaaagcaccaaacacatttacttttagttctgaaactgtcaccgtaagagaaacttgtgctaatatgtgtttatatgaaaatgaaagttgagtagatctgagtctgagtttttatacaacttgtttagctgtttcttaaaacttctttcccagggtcttgtctcatatcttttcaagaatatttgtgttctgagaaaatctggattagtctgcacttgcctaatggttggaatattgagaaccacaagcaaatagtcagggaaacctttccaactcagtcttgtttaatttagcattcacaggcaggtgctgtactactcacttcgcacgtgatttggaagggttgctagcccaccgtgatctaaaattcctgtcatgaccaaggcaccaagattagtcttgtctttaatgataccttgttttgtcttgtactttgctcaatattttcatttactaatatcattggtcatgggcacatttttgggaggtagagactgagatttagaccagtcttttaatcccatctcattctttttccactgttaccagattttcaaaaatctatggtaatattttcatttttttttaggagatagggtcttggtctttcacccatggagggagtgcagtggcatgatcatagcttgctgcagccttgaacttgtgggctcaagcgatcctcctaccttggcttcctcccaaagtgctgggattacagacatgagccattgtacccgtccttccatgaatagtacctctcatgaagatattatttaaaatgcaatacatggttaattagagaagtatataaatgtgaattctaaggaggagattgctttaaagtagacaaaaagtattactgtaaagagcaatgatagctagtaccttggtatccttaagattttggagaatatattgttaaataaagggaaggtaataaagtggatgctggtttaacacagagtggaattaatgtttatttttgttcatttcacaaaaagagcatatcaagtatcagtagcaaagtacgtgtgaatatacttctgcactcgtgttcccagcattgcaaattgtagttttttgattgcctgcttatgtgccaggccctgaggcttggtgcttgtgataaactgtcaggaagcaatgtaatacagttactaaatagtgcagacctctgccactagcttgttatttaacctccctcagccttagtttactcattgataaaaagttgaaagattttactgccggatgcatacaatccatttttgttataggggttgctactatctgttcactgagaaaagacatttttttaaaataggagaaatcctacatggcttgtcatttagctctggtcatttgaatattacataccactcatgtacctgccaccagtcagaaaaatagccgtcattttgtgaaaccagtgtgtgtgtgtgtgtgtgtgtgtgtgtgtgtgtgtgtgttttagacaagtgcagtagtgagaagaggggaaaggaaactaatgtttgaattagtcttcagaaaggatttctgctgtttgcaaagaaatcttagccctttttttgctacctttaaatgaagcataagattcccataggaagatgctggatatcacaaaagcaggtgtattagagtttattttgtaatcttgtaattttagagaaaaagatgatgaccaagagttgctatcatgcttcctaatgaagcaaaattcattcgtgtcaattaagtggttggttgtttggtttctattccattcacatcaacatctctaataatgagttgctaggtggtttggctggttttgaataaggtaagcagtgacgtaatatattggttcctgaaagttaagcacactattgtcaaaagattgtcaacttggaagaactcacctgtttttgagatttgtttttgatatcaagaaccacgtagttggtgcctttcaaaagagacacaagacaaatatacttgatatttattttgtaaggttttggctgaggaggtctatacttgttgtccatgtagaattagaaatcacaaattctaatataatactttagggctagggtaggagataggaaatgcctcttaagagttgaggaaagccttcaacaattcactgtagaattttgcataaatagaaacctgtatttggaaacccacttggcagaattgtaagacatgtccttgaacagactgcatttcagaataatgacttttttaaaaaaagattgagaaatctagtgaaattgaataattgtattttttatttttatttcaattttgttgagacagggtctcactcttgcccaggctgtagtatagtggtgtgattgtagctcactggagccttggactcctgggctcaagccattctcccgcctcagcctcctcagtggctaggactagcacatgcctggccaattttattttttgattattgaaatacatttaactttaagaaaacaaaaccactaaatttcaattaaatattttcagttcatgataggttttagtttaattgtagaccaaaaaaccaaattattcttcagataccatgaattaaaactaaactttgtttagtgatataagttgcaaagggcaagactattcaagccagcatttaactctaatacatatatatcccaaagtgctgggattacaggcttgaagccccaccatgcatggcaaacgatatttttaaaagccttttatttatcatgcattatgataaatactaggaaaatacctaaatagtatcctatctagctattatcctagatacctgaacagtatccccgttcttaaggattgggcaaaggagttctgtatctatttactgttatttaatgtggtaccacattaaataacatttaccacatttaatgtggtaccacattaaatacttgttcattgttctgacttccaacccatttactctaagcaataatgctacattctactaatttcaccttacagagaaaagagaagccaacagcctggtggaatatccttaagttctggctttagctctctctatgtacactgcttgtctctgctgtctctcttaagtacccagacccgtgctcctgtatcacaagactccttaggaatcttacacaatggataattccttctcttcgcagcaatatctttagtattctccctttagtgactccttcctgtcagtattcacatatgtaattttcggccgggtgctgtggttcatgcctgtaatcccagcactttgggaggccaaggcaggaggattgcttgagcccaggcattcaaggccagcctgggcaacatagtgagaccctgtctctacaaaaaattacaaaaattatccaggtgtggtggtgtgcacctgtagtcccagctatctgagaggctgaagtaggagaatcggttgaacctgggaggcagaggttgcagtgagctgagatcgtgccactgcactccagcctgggtgacagagggagaccctgtctccaaaaaaaagtaactttcagtttcttaaaaaagaaaaaaatcagtcgttaccctatttctcacacttcccttttatagctaaatttctcaaaaagattgtcagtattttttcttaattgatcatcatctcttcagaacacagaccactcttattttttctgcttgccccacctactcaccagtatcgctcagtaagattaccagtgacatcctaggtgcttattgaatgaaagtgatgtccatttttagccctcatcttgaattctagggagcattggcaaagtggactacttttcccctaaaagtcttttatatattttttgtaactcattaaatgttaggattattcagtatacttaatcttttctcactgtctcatctgtttcactcccatggttttatttgccatctatattctgtattctgacaaaaactgttttttcttttgagttggggtctcactctgtcaccccaggctggagtgcagtggtgtgatttcagctcactgtagcctctgcctcccggactcaggcggatcctcccacctcagcctcccaagtagctgggactacaggtgtgtgccaccacacttggttaatttttgtattttttgtagaggtgtggtttttccatgttgaccaggctgatctcaaactcctggcctcaagtgatctgcccacctcagcttcctaaagtgctgggattataggcctgagcccccacttccagctaagcagtctagctttaattggtctccacttctgaaccaatgtggatgcaccagcaatgttttatacatctagtacttactagttagtactagcagtattgtttgagcgtcaagtaccataattgtaacacttggcttgttatattatccaattagattcctagatcacatctacgatataggtggatgtaaattagggagaaactaaggcatatggtcacatagcctgtaacagaaacaggagtggcacctaatttaccctggttctacagcccattcctaaccagtacactgtactcactgtacatgtcttaggcttctgtgagccttgtagtattgaacacagtagataattcattacttacagatggtactttttatttaagaaacagttccaagaaagagtggtgttttgggtggtggctatggtgtggtttgtagataaatttttctatgtttccttttcagatttagatggtgctctactctcggggccagatggtgataggaatgtgaatgcaaatttattggctgaagctggcactagtcaagatggaggtgatgctggtaggtacagtaagattttagcaacagtacatttaagattgggaagtgttacatcttacctgcagcctagtgtaatttctcttccataagggggttctattgtatataactactttcaatctatggtagctatgtttatgatgactggaaaattggtaaatgcaaattgatgtttccggttttgtatgtttgacggagtcatttgtttagttttaaaaactcctacatataaaaagtaattgagttaatatggcttatggcttcctgctggtatatagatacggaacggaaatggtaattacgataatggttgaatttattttaattagtttttatgcaaaatgatggtgtagttaatggctatagaaaatgttgattagttctgtgtgatgtcagcagtgcattggaggaagcttgatgaatataaaaacaaagaatccatgagtatgttatgaataaaatagagtaaaagaaagtcattctttacagaagaatgccaagctgatagaagaatgatagaattggaaaaatagctattttgcaatccccacaggaaataattcaaagtcatcagtggatgttaagccaccgttaatgggcttgtccccctatgattgggtgaaagattgttggggaatatcatattcacatggtctcaaattattcccatggattcccatagatgatttccacttgcaaaggggaaaaggtaaatttacaataaggagatctgagaaagattgtcataactaagtgattaaacttagtgccattaaaaagagcacaaaccaaaattaagggctggctgatttgatgtgccacctggcatacaacatttcctatgcagtattcttgagaaactgtttagcttgtatctaatgacaaaggaaaacccagacattgatgtatacgacaggtagtccaaactctaaaatgttaatgttacgacagacaagtggggaaaccactagattgaaggagaccaaggaagtaaactaaagtgcagcatggatcttgattagatcatgggaacaaaaaatggctaaagaggacattttggggccaactggaaattagaatatgtagtgtgtgttaagtgatattcagttaattttaaatttcttatacggtggttatctaggagcatgttctagaagatgcatttaggcttgaagttatgagcatgcatgtttctaaatagtgcatagaaagcatgtatgtgtgtacataaaaacttgacaaaactagtatttgttgaagatagatatggatgtttattgattgtttcaattttattagctttggaattcttttcaaagttggtgagaacagagacagtgaggtacttgttactaagagtagtcgtgggctctgaattcagtatgtactgaccaaaataaaaccacatttctaaagaaactgccttaaggtggtttcccctgactgtttaaaagaatttacaaaacaagttttgaaattagcagtttgtacgtcagatgtcttgaattttaaagatttttttgctcgtacagaaagttgctaaccgcgcaagaagatgttactgcacttgctttctcagttttgaaatctagtccaagaatgggtttaattagggatatttgaattcatatgtaaaattttaaatttgtaaacctttgatatagggttattcctcttaaaggggacatttcgattcattagtatttttgcatctgagatcagcctttgcttgatgattttgatgtcaaaaacttacattgctttttccttagttttctattgtggaataatgtacccagaaggatattattgatcagtaagcaccattttgaagagatctataatgaccttaatgatccttaagtgtattgaattacaatgacagtacctttatttaggccactcttgtaattcctacaagtattctctgttataagaattaggagagatgaaagaaatttggggcaaggtttacttaatttgaattaccattttgtattccagatagagtattcattccttgttatcatggatgttgaatcttggattttcagtttacaaatggttttagggatattcttctgtctcctttttcttttgagatggggtctcactctgtcacccaggctggcctgaatctcatgggctcaagcgatcctcccacagcctctcaaattactgggatgacaggcacgagccactgtgcctggcctatttccttattcttacatgttgtgaataatatttaattgtagatactagaacatctaatgtgtcttttggtactagttttccaagtattttgagcaagtcagaagtatgtattggcatttgctagataacatttattctacaagtaattgtagggcatgtgtcttaaacaatagaaaaaccaaggcaagtaagataggcgcaggagtttgtactgatttagacaagaaatatggatcataaagctcaaactttgtttagagatgtgaaactaacagtaggttgacctccacaggctaccacttccgttccattctttatccctcacacagaaatgcttcactttaggattcttacaacttactcccaaacactaattaggtgcagctataatgagttatagttgaatttatgtagctatgggttcagggggctttctttacatcaaaaaccggtgacggtattccaagtacagcacagtttacagtaatagtaatgatgtgcagttttaaaatattttagagacatttttactttgttgggtattaagactttcaccaaaaaggaatcttaagttatcttaatttttaagagggacagcatgtctgagaacatatatgggaagtgattcttaggaaatccatttgggtaaacattctttacttttaaaaccgtgatgcccatgggaggaaaatgtattattgctgcttgagtgaactgtatcttggcaaggagtgttttaggcagaggaaagcttaagcactttgaattgggagcatgcttattatggacgaggaacagaacagaggtcagtatagttggaatagagtgactgaaaggaaagggtggttggaagccagggctccaccgggtaaagctttggaggatattgaaagtctctagcttttactgtgagggtgggtagtctttgcagccttgtaagctgagtggtgacctgacttaaggtagtgttttaaagaatctgtgatttctctgctgagaacagactctaggaaggcaacagtggaagtagggagacaagtttttggtggctactgaagacagtccaggggctagagctcatgattgattggatcagggtggcaatagttgtggaagattctggatatatattcctattgccaaaaggttcctggtccaaggaattacattaaagatggaattaaatccagtggatataattcctgtccttgctaatctgaagatccttaggcacatgtattattctattttgattctatcttctgcacgttattttatttaaggatggagttagaaagaaatttcagggaaccctgagagcattcagttaccttgccctaatatgtctgaaacaaggatctagtaatagaactttacatttttaattatcctatatatattctttattcttagtctatttttctgtaccaattaatcttaaaattatgtgcctgtcctggattcgtaataaggagaatatcccatttgatagctgggctttagggtgataaaatcttaagtgatagagtagttagaaaaagcaactattaggagttctggtttgaatatacccatcctttaaaagggtaatttcttgtggcgtctgcacaattaaatgatattcatgtttttttctcccgcccgccacctttttttttttttttttttttttttgagacatgatcccactgtgtcgccctggctggagtgcagtggcgcaatcttgaatcactgcaactcccgggctcaaatgatcttccccagtagctgggactgcaggcacacaccaccatgcccagctaatttttaaaatttttttgtagagatggagatggagtttctccatgttgcccaggctggttgcaaactcctgggctcaagtgatccttctgcctcagcctcgcaaagtgctgggattatatgcatgagccactgtgcctggcccatgattaatttttttaactgaatttcttctactatagttgaatggtattttgtttaattgtgataataaagtaggaagacatctcaattttagactaaaatacagttttatttaactcatactatgaaattctatcataatgcctgtaggatataaatataatttctgttttctgactctgatgagagacagatctttattaccattattaattcagaatttttacttgtactaggtacttcacatgatttcaagtatggtttgatgcctggtccttcaaatgatttcaagtatggattgataccaggtacttcaaatgatttcaagtatggattgataccaggtgcttcaaatgatttcaagtatggattattgccagaatcttggccaaaacaagaaacctgggaaaatggcaagtattagtcaactaaacaaatacagaattaattaaataattgttaacaattaaaagctttcatgttctgcattttttaaaaaccaagtagcagtagctccacataattgctgttctcagagatagagataagaagttttgatagcaagttttctgtttaatgtgtaataagcactttctctttttttaattctcataggtgaatcatctctaatcatgaacaagttaaaatgccctcattgtagctatgtagccaaatacagacgaacactaaaaaggcacttgctcattcacacaggagtgagatcatttagctgtgatatttgtggaaaactgtttactcgaagagaacatgtaaaaagacattccctggtaagtaactttaaatacagctgatctttgagataaactatatttatgtcagtgaagtttaaagggatttaaacagttaattgtgaatttaaggaagattgtctcctaaattgctttaaacagtttgactttatgaactgatagtgagctttttacagagaaactggtgtattcactcactattaaatgtgtggtttaatttgagtggttcaaatgcattctattatatataatatccttatattggattttttccccctccaattaggtgcataaaaaggataaaaaatacaaatgtatggtgtgtaagaagatcttcatgttagcagccagtgttggaataagacatggatctcgacgttatggtgtttgtgtagactgtgcagataaatcacagccaggagggcaagaaggtgtagatcagggacaggatacagaattccctcgggatgaagaatacgaggagaatgaagtaggagaagctgatgaagagctagttgatgatggagaagatcagaatgatccctctcgatgggatgaatcaggagaagtttgtatgtctctagatgattaactgacctactatactcctcaaggatgctgcatttggacctaatatgaatcgacaatttggattgttgaacttgaaggcttgcaaaatatggtacatgctggatagtagttatgttgctgtgaaaactgtagggtcaaagccttatagcaaaaaaaatttttttttatatttgcacaggactatacagcaaacaaccatgtggttggattacatggagtccccacatactcagtcagttatcaaagtaaaatattttttatttataggatatacagtaactatttgggtcctatgaaaatagtccttaaagagcttacattcatgtgctactttaacatgaatggagaaaatccgtttatggaagtacagtgacaattgacccaatcactctgtccatcaaaccactcaggctagtttgtactagtagagttttgtttctatttttatttttattaattttattttttttaatacagattttcagtgaggggctttttcaaccccattggttctattttcttgtatttttccatttaatttgcttcataacttaaaccaagtctcttctagtcttaggtattatttctcgattttgtgctgatgggcatgtttataagaactggagaggtaatttattggaatgaactaactgacttcctccattcccctcttcctttttgacatgaattttactacttcacaaatgaagaatgatgttatgaagttaccgtggcgaagttgacaaataccactaaaatgattatgatttagaagtaactttcttctgctgctctaatctgataaatggttactatatgatattttctgacatggtatttggttttgggtatctgttactttggcactattcttgtttgcctctttatttttgccagtgtactatacctcagtcctatttgaaagacctaattgaaagaaaaatcatagaaataagtaaaatgatttgttttataatttatccaccatgtccagtttggttagcttgttatgcaatataagtgaaatatcaggtttttacccgtgtcccttttatcatgaaaattaacacaaaatgtgcattctcttttgtttcatacttagcgggatattgattgttttgaaattatgatcaatacttaatttatttttttctgtccttgaagtcactacaccttgatacagtctttctagtagtcaccatgattcaacagtctcaaaaatcttacaaataaaattctgagaagctttattattctataaattcttcagggtacaaagggtgacatattgaggtgaaattgtcagatttacttagcctggtgacatgaattagctgattgtggaactctcagcagcatttcacgtattgttaacatgtatggcatttattagcatattgtatattatataagattgagggatgtcatattttcagctttcttttaaataaaaattgagtatattttcctattttatatcaggtaactaaattatgctagttatgtggaaaaaattgcaaagatgctttgacagatataatccctttggtgctccatctgatcaaagttgaaaagttgatgttttttaagagacaagctttatcattgtctctgatttcagtagaataatggtttattgttagacaatgatgtttctgcttggataaatcaaagataaattacagttacatggttagatgcatcttttgtcatctatattgtagtttctacataactgtaaacctgacagataagaatagtttcggtttgatttttgtttaaaacagatgagtacttcttaatgttctagacaaatgagtaaaatgtatttctggtagaaattagttgggcaaagatactatgaatgaaaaagtattttaaacgtaaaatgttctttgtgaatatgtaagtatagtataaagatttctttcatcccatttatccccttcctttaaataaactagtttacaattggtagatctgtctatatataaatatatattaaagaacaaagatatatatctaaaaatcacctaaatctgctttattagactacagttcacttattgcatagaaactggacttggctttacattcttaatgtacttttacttttcctcaagatatgaacttactctcttgaagctgaattttcttttactacttaaatcatttatgtatatctggtaaattatgaccaaatttttgttagattgcatacagtaaattgaaatacacacttggtacactacgggattgttgtgcttttgtttggttttagttggaaataaggtttgatgtagatggcttgttactgttaatttaaaatattctataattgtccattactttatgttgtgttgtgacagatttggctatatttttagtcaattgaaatatgatactttaaaagtttgtttttaggtaatccaaaggaaaagtgtttatactcttgaatatattagcctcagcctatataaaaatttctttgaagtaaacattttaccggaaacagaattgacagatttttctacttgctgactgcctaacttattttgtttcatgatctcgagggactgccttttcccatctagatcttttaaaaaaatagttttagtactaaggtatactactggacatttctatttttttaagtgtattctttttctgacttacagtaaaatttcaggaagttgatagatactaagaacttatgattggtctcagaggtaacaatgaaatactcataattttgtctgtggaactctggcagaattatgttacacatttggcgaagttgtctcttgtaatttatattttaaatgaaaaagtattttagagcttttaatgaaggggaagagtataaactttctttcatattcactctgtagttacagaccgtctcataaatcaagattgtgcattattagagttctcagagacagatacttccatatggacccctgttcatttttcttatttactagatattttgctaaatttagcacactagcaattaagagtttaaaaaagaagaaacgttataggaaagggaaactgaacagtaatgagtagctttgaaattggggaaaacacactagctgggttaggtacagctatcctaatggagaagagtgagctaaatgcgttaattcatgtaaagtgcttagaacactggtacataataggtgcataacacatcttaaagttgtttaataatagataagaaccaagaggaaaaagaaataagaaaagatgggggaaaggaaggagaaaataggaaatgaaaggattaggacttgggcatttatattaatacaaaatggtgtaaacggcctgaatatcactgtagtagtatcatacgggggaaagtgtgatggaaaataggtttaaaaatcttaatttttaaaactttagtaagctttatttatattttttaggattttctgaacatagcatgaagggtttagattcatttttctgaaaaacgattaaaaaaactaccaattttttttttgagtgcccacacttgccgttgtgctgtatacatgattttaccttaatcctctataaggtaggtgctaattgtctccattttatagatgaggaaaggctcagagaaattcagaaacttggctaatttaacacagctgtgacagagctcgaatttgaccacgtctgattctgaagcccatactctttcagggaggctctattgctgcctcattaaacaactcttgtagaatttcagctcttaatggagtctatggattatatttttcctataagacagctgtgtttagaattttgagtgtctttcctccccccaataaatttccttactactctttcttcataaagcagttgttttgtcactttgactatattaagacacatcagtgtagcacatgctcttaactggctgtggcattttaattttataaaagaatggtttttatctgaagaactagatagaaaccccagtttttgtgccgttcagtcacccagatccttaaacttaactatggtacataatatccacacttagaactaacaggtgtttagtcactttaggacttaaaatggaaagtttttttttttttcctgctgtatctctgctttcaactgaagttaaagaattctagatagtttaaaatgtgttagggataagcacacttcaaaagatgttttctagccctaaattttatgacattgggtacttaaatttggagtacactagctattgagaacaatattttgggttgaggagagatggttgaggccattatttagtgggagcattggcattttgaacactgtaaacaaaagaacacttccgcctgctgtttgtaaaagctctttgggaagatcttttacgaagaccaactttttaaaatgtaaattacctacctaatataagtgtcctaagacatgtatgtaaacttccggaactgttttgtctgtgtatttagaaaatacacaagaatctttattcaaacctaaaaatataaacttgtgagcactaaactgcttctggctttgtgaattttattgactgacatttaattcagatttctttgcaagtgtactaatttagactaattggggtaaggggaacaccttaatgaactttgacttatgtataattcagatatctttgtacttaaggcttacaagtttgaattatggaatactataagggttttttgtttatttgtatgtttttatatgaaagtacataaatgacagactacctccaagtaatcctgctttaattaatagcagtgatttgtaatcagtgtatcttttaagattctctacaggttttagaaaatattaaaaattccctgtaatttacatttgtgcataatcttggaaatgggttgaaaagcaaaggtaaactgcttcatcccatgttgtatatttgtggactgattgactacaagtgatgtgatgttataaatttgaagtctttgaaactttattaatgtagagaaaacataactagctttttaggttatttcaaagttagtaatagagcaaaggaaatcagaactggccagatattcagacttgacttagaaaaacaggagtttgttgattttgtttggagaagggcacaataaaggggagcccacatagcattataatgcctagtatctttaaacatgtaaagagctatcatgaggcagaagaattaagaaactttatatgtttctaaggggtcatgattgggaccattggctcaagattgaaaatcggtttttaattatccaaagatgaaatggggctgcttcagaaaaaggtctaccactggagataacgctatgaaaagtgaaagagattacttaatcattttgacaaaggcagtattgaccagacatttctatttcagagttggatttgtgcttagttttttttaggtgttgggacccttgtagttgctttttattttgcttagtcaacaaacactaaaatgataaaatttggtatgtataagtactggacgaaggatgttttgacactaaaaaggacataatttaggaaattaagaatttagacaccaagtttggcttaatagaaaaagtcactatctgaacttctttctttttcaccacaaatcaccgcagaccagtgtttgggagcaggtgtaggaaattgaattattggatctatgtttaggtaagaaaactaaaggtacttcagaatttaggctatgacataactgtctttctgaagtttaaagaaagaaagtgaactatagaaatctattcagctaattaaagtgaatgaaaaatattacagattccataactgcatggcgccttacctgctattaatactgccgccttactgtcagccagatgattttttcccaccacggccagtcttaaatttggcaataagaaaaagctaatcttccaagtgtaagtaggtatgtgttagaatcttggtgaaagataaacacaagacagtcttcttggcgcaggtcctaacagttggtgagataatacataagatggtttcaggattattgtagaattatttaggttgaaagagactgtaagagactaatgaagcatacccagagaggttgctacagtgactccagtcagttttaggacccaggactcctgaacttcaatttcagtattatttttctgtaccaaactcattcaataaatacttgagattagggataagtttgaagttagaagattccagagtacactcaaatagtatttggcacatagcttgttgatcaaaagtatttactaagtgagtgacaaaaggcactagcaactttaaggattttgcctattagtatcatatggcatgtagctatcaagccagtttcgtttagttattttgtgttgccaagcatatgatacgtggtgtcacactgagcctttgggatcctttccctggatacataaccctagtagataatgttactgcaagatgtaatgaccaaatccaacctactgcaaatgttactatggaaatctcaatgcaaaagtagcctttgtgattttttttttaaaccgtctccataacagaacacttagaattattagccatttgctgcaaagtatttgttttaaaatgtctggcatatacaccactaacatttaaatgcccaacattcggtctatacgtgaaaaaactagaagaaaagccctgttggagttttgatgtagagtgcaataatacatcaataaaggtattttaaaatga

SEQ ID NO: 318 - DNA, 5538 bp, Homo sapiens
tcttcctcagtcgtgtggcaggccctgagcaggcagctgggtgtccccgctcagatccaggcccgagtgggctgggcggctgcagagccagtcacctgagctacccagggtgggatccctggccccgacctctgtcctgacacgccccaagcggcagcaacaaagccccaattggcctgggcctgggcaggaggagctgggccgggtgccagatactgggatcagccactgcagctccctgagcactctctacagagacgcggaccccagacatgaggaggtaatgccaccatccctgagccccaatccccaccccacccaaacctggaggcctggcccttagccagagggggcccagctgtgctgcgctccagggggcctggttcaggggagtgtgcgggtgggagggagaaggaggggccctctgagggtctggggtctgccaccaggctctacctcctctgtggccccgagtgcacttgcctcttggttcccctggcctggtggagaatcacccagggacccccacccggaacaaggaaaggggaggtgccaggctgaaaccagcaggcctgtgactgcccaaaaggaagggggctgggggaggggaggggctggggcgcaggagccaggggctgccctgaggtggtgtcaccctgggagctgtgatctggagctcagggaagcacccgggctcccgctggaccctggaatcagaggctgccttccttctgtgggggtgtctgtcttccccctccttgtgtgggggacccctctccccgctcctgtggaggtgccctcctcctcttccccctcctctaagccagggccctccctgcccctcctctcctggtgtttctcccttgtagagaggtggcttctgggtagcttggggaccctttggtgcccagagccgtttgcctggagaggggacccacggggatcccacagccaggctgcttggcagtcaccaccgaccacctttctaggggctaccgtgacccgaatcccaggcccccaggctgtgtgtcatgggaggtgggcaccaggggtggcccaggcagcacggcagtgggattggggtccagtgcccagacaagagcccctgcccagcatcagaaccagctgggggtcctgaggagaagcagggcccccgaaccagaccagaccaggtcccggccccgggctgtccggggcatcccccctgccctttgacctctcaccatggctgagtcacccagagaacgggcaaaggtccctgtggagctgcaatccaggcctgcagggtgtcccagacactgattcttctgcctcagcaggagtagctgcgattacaggtgtgtgccaccacccccagctaagttttgtttttttttttttgagacagagtgtctcgctctgtcgcccaggctggagggactgcagtggcgccatcttggctcattgaaacctccacctcccaggttcaagtgattctcctgcctcagcctcccaagtagctgggattacaggcacctgccaccacgcctggctaatttttttttttttttttttgtatttttagtagagacaagttttcaccatattggccaggctggtttcgaatgcctaacctcaagtgatctgttgcctcagcctcccaaagtgctgggattacaggcgtgagtcaccgtgcccaggcagtttcatatttttagtagagacggagttttgccatgttggccaggctggtctcaaactcctgacctcaggtgatctgcccacctcagcctcccaaagtgctgggattatgggtgtgaaccactgcgcctgccccagacacccttgactgcagccctgctgagccctgtacagacccagagccccgccccaccccaagaccaccccaccctgacagacgcaagcctcccccgcagggccctgaagagacaagtctgcaccacatcacacacgcacgcacacacagacacactcccaaaccctcacactctacacaccacacacgcatgcacacagcacacacccacccccaaacccttacgctccaccccacacacaacatacatacacatccaacacatacatgcacacacagcacacacacacacccaagcccacacactccacaccacacacaacatacacacacatccaccacacacaaacacacataacatacacacacagcacacgcacccccgaactcacacactccgcaccacacacaacatacacatgcaccacacactgaagcacacagtgcacacacacccgaacacgacaccacccacagcatacatgcacacccaccatgcacatggtccacacccacaaaacacacatgcacagacaacatatgcacaccccccaccacatacacaaacacacacatcccgtgtccgaactgacctgacaccctgcctgcctgcctaatagtgctgccattcacccctgagccccccagccgtggccccgcagctctgggacacagcaggtgccctgcctgcagcagcgtgcagcctcagggctctgtgggcgtggggctgtgggccctcgctgctccatacccacccatacccacacccatgtgcaagtgtgttcatgtgtgtccccacgtggagggcggcacagaggcatggcagaacctctggagtttccaagccaaccaccagtgcctgccacagtggggtctgcccagactgtgaggagcagagtctggggctggggctgtgggctctggcctgaggggggctggaggcaggtgggcctggggcttctccctgttctgtgcctgcgtgtcttggcccatgtgagcacagtccagtaaaactacctgcgctcccaaggaggaacccagcccaggcctcccagctgcccatcagggtgctgcctggagttcagggcgtccccttcccctacctcacacttccctctctggccccccctcaggctcctcctggtcaccagcctggtggttgtgctgctgtgggaggcaggtgcagtcccagcacccaaggtaggtgtgagcccctcccatctgggcagcaactccagttgtcaccttctgcccctacagcaggggatgtggacaaagggcccctcttctggcttcaaaccccaagctggcttaggggagagaggcatgggtacgctcatgactcttgatgcctgtgcaggcatgaggagggggcaggcttcccttccctggggtcagatggacaggcctcaagacacccaggtggtcctaggtggatgatgtgggtccagatgagcccacatgaccccaggtggacgaggtgggtccagatgagcccccgtgaccccaggtggaggaggtgggcccggatgacacccacgtggtcccaagtggaacaggtgatcccagatgaacccatgtgacccaggtggaggagggcccggatgacaccccttgatactcacctgggccttgaaggccagaggtgactccatgtgctagtggctcagctgcactgtctgtgctgacagtggtgtcctcagccgggactatgcctggggacgggccctgttccctggcccatgtcaaggccacacagtcttgcacacctgggatggatcgggaggaaggaggcccacgccttccttgactggagacgcaggagcatgggcacagcccccccacggtgctggtcctcccctggagccactggtcctcccctggggtcacctgctttgctctcctgtctgtcctttgccccactgaggatggctgggctcagagcagctgacaactaaggttggctgggctcagagcagctgacaactaaggttagctgggctcagagcggctgaccgcgttctctcggcaccagccaggaaggggtggtgcagacacagacccaaccagtcactgcagaaaacagccagtgcattgacggccagggttgggagtgctaggtcagggatacggtgccaggttacatcccagtcctgtgctgccccagacccggccagaattccaggccagctggtcatctgggcacaggccggcaacctcaatcccggcttgcaatcccaacacccgagagtggcttgcccactagagacgctcgagctgtgctgagctggccctgcccccaccccctgcagccacctccaccccatgcagccccaggtgggcctcggagcaacctctccccaggtgtcctccacccgcgtggactgtggcccagcccacacctgtgactctcccccaggtccctatcaagatgcaagtcaaacactggccctcagagcaggacccagagaagtaagtccccccaaccccacctccccaccacccattccctgaagctacagcccgttctgctgggcccttcctgaacctggagagcacggggcagatgcagagaggagccctgtccagcagcttttggaaggagggggcactccagcctcatgggcatctgtcaacagcgccccatgcagggagaagagagcacagccggagggcttggggctccacggtgtctccctactcagcttccccacagcctccagggcagcttgtgctccacggctggtggctgtagctggggcggctcagtcttggatcctgaggttccccacatccttgcccttgggacactgctcaaccaaggctctgaccactgctccccacgcagccacccagggacgtggtgtggaagcctggccgggagcactgggggccactcatcactggctcttgagagagaggcttgtcctggggctgctggtggtggggctggagtggctgccctgggatggtgggcaccctcctgcggggggttctgtccacctcccccacctgcatgtggacctgaccaaactgtgccagcagggcctggggcgcccgtgtggtggagcctccggagaaggacgaccagctggtggtgctgttccctgtccagaagccgaaactcttgaccaccgaggagaagccacgaggtcagggcaggggccccatccttccaggtgggcacaaggtcacagcagcagagtccgctcgtggggttgacttggacagaccaagggtctcgggaaagaaactgagactataccttcatgtgcttgtccctaggcaccaaggcctggatggagaccgaggacaccctgggccatgtcctgagtcccgagcccgaccatgacagcctgtaccaccctccgcctgaggaggaccagggcgaggagaggccccggttgtgggtgatgccaaatcaccaggtgctcctgggaccggaggaagaccaagaccacatctaccacccccagtagggctccaggggccatcactgcccccgccctgtcccaaggcccaggctgttgggactgggaccctccctaccctgccccagctagacaaataaaccccagcaggccgggcgcggtggctcacctctgtaatcccagcacttttagaggccgaggcaggcggatcacctgaaatcaggagttccagaccagcctgggcaacatggtgaaaccccgtctctactaaaaatacaaaaattagccggg

SEQ ID NO: 319 - DNA, 19516 bp, Homo sapiens
gggtcctggaggcctctgggcgcgtgcgcgggcggtcgctacctgcggccgagccagggagcgagagggcgcagagggcagcgggcttgggcagcatgaggcccggaggggagcggcccgtggaagggggcgcgtgcaatggccgctccgagctggagctactgaagctgcgctcggcggagtgcatcgacgaggcggccgagcggctgggggccctgagccgcgcgatctggagccagcccgagctggcctacgaggagcaccatgcccaccgcgtgctgacgcacttcttcgagcgggagccgcccgcggcctcctgggcagtgcagccgcactaccagctgcccacggccttccgcgccgagtgggagccgccggaggcccgggcaccgagcgccacgccacgcccgctgcacctgggcttcctctgcgagtacgacgcgctgcccggcatcggccacgcctgcggccacaacctcatcgctgaggtcggggcggcggccgcgctgggcgtgaggggggccttagagggcctccccaggccgcctccgcccgtgaaggtgaggtggggcccgggtgcgggaccctatccgactgcccgggtcgggggcgacccgggaagggcgggactctcgtgcgtcccgcgcgcctcggtgccctcccgcccggggcaggtgtgtgtgggaccgcgctaaacctgcggtcctcgcctcggcgcaggagcagagctgaacccccagtcaaagtcagttcgcgttgccgacctggcgacatcttgcagattattgtttcctcctctctagttataaacagctctgctgagttgttcccttaggaaagaacttacacccaagcctggtgtttgttacgggttatttttggtaactgagagaggcaacagcaatttgctgacaaggttgtgccatcaatctcaggaggaaataacttcttgtaggtaatcctacggcccctttttattcgtctccaaataaatcttttgtttgtggcagtcctagaaaatgtgattcaagtcattggtatttggataggaattttcagtcgctagaaccaccagacccctagaagtatacaaataaaggggaagtgaatgagcattatacatagatgagttcatccttaagtcttaatttttttgttttatgattttaagaaatacctcgactctttaaacagggaaatgtcgtttatgtttgtcgtagggcaagtttaatcctgttttactctgcttttccagatggtatattctacactatgagctaagattcaatcgtcattcagttaaggggaaaacaaatgttttattttcatactctttagttcatttcccccagtgtcagtaaccttcctcttttatcctaacactacatcttttgtggctttttcactttagctgccttcttttttctgtctctggaggctcgtttttgcatttgttaggtttttgtttgggttgggggaagcatgctttgccatgtcacaaacactggagagatttcgcttcaaccacgtttttaaaggttctgagtagtcagcgagagacatatcgtatttaatgagttaagggtcaagaatgaagagcggtgggcagatcagttgaggtctggagttcgagacccgcctggccaacatggtgaaacctctgtctctactaaaatatattaaaaaaaaaaaaattagctgggcgtggtggctcacgcctgtaatcccagctactcgggaggctgaggcaggagaatcgcttgaacccaggaggcagaggttgcagtgagccgacatcgcgccactgcactccatcctgggcaacagagcgaggcctcctcttaaaaaaaaaaagagcggcggcttcatgtcagagtttgagcactgtagaaccgccaaaaaaaagctaaactttgagaaatgtacactcttttttttttttttttttttttgagacagtctcattctgtcgcccaggccgagtgcagtggtcctatctcggctcactacaacctccgcctcccgggttcaggcgatcctcgtgcttcagcctcctgagctgggattacaggtgtgtgccaccacgcccagctaatttttgcattttttagtagagacaggatttcgccatgttggcctggctggtatcgaactccggatctcgggtgattcgcccacctcggcctcccacagtgctaggattacaggcatgagtcaccgctcccggcccactcttctaacttcaaatggttgttctcaattttagcaaggttaagttattaattatctgaaaatggaatttaagttgatttcctttgcaagccaagacttttccagcttgtttcattgtgttcttatacatgatcttgaaaatatattagttgtttattttgatttttaaaattgtttgaagcagttaagcttaaatatcaaagtaaaatgtttattctgtaaagttctcttttgtttaattaggtgtttggtgaccaataaatctgcctggttgaactggtggaatcgaattagtaagtttgtgtaatagttggctgtttctaactgtggcattaagacttgtttaatgttcttcataaaggattaatgagttcagacttttaaaataggtagcccagtaaggaatcagagtttaggccagaagatcaggacatctaatcctaattctgcctgaagacttgctctgtgacctggggcaagacacttcactcaattcctcaaaaacaccccctgtaaaatgatgatagagatcacccacctacctcacagggttgttgtgaggataagtagtaagttaacagaaagtttctgactcgtaaagtacttaagaataattatatacatacatacactgaaaggcttagtcgagaggaacctttttgaaacaaatcctaacaaattttgagggactaaacttgtagtatttttttttatctttgccattagttgacttgtaaaattgggaaaagctttttatagtgtctttagtacatactttgcaccaagttggtataacaatgtacattttgtgattaatttagcaccatttgttgatgcccattgcgtaagcgtcatagaacaaaacctgtcttaataggttaaggactttaatgtagattgtgaatacatatgcaggtgaacctgtttgatatattcctatgaggattttgttgtttttccctgacatgagtatttccttctaggtagttgtcctgggaacccctgcagaagaagatggtggtggcaaaattgatttaattgaagcaggggcttttacaaatcttgatgttgtttttatggcccacccatcacaagagaatgctgcttatctaccagatatggctgaacatgagtgagtaatcaagttgaagataaacttcttaggggaacacaggctatagaatacttttatgtctaaaccagagacgaaaactccacatttgtatatttaagaagtaaattgaaagacaataacaagatgtcttgatctatggagtgacatttggcaagcctcttctaattgagattcattatggtgttcataattggagtattaaaatagtagcacttagaaaccataggaataacaaacatgttgacaattaagttctcttttgaactgtcaataatctggtgtctggaaaacatctgtcctttcatatgaaattgtctttgcaactgaatagatttgcgagagatcgttctattagctatgggaagaaaccacacttatccattttatttactttaatttgagttctttgcaaagaggataaattatgtcctgagagagaatatggaacatgagtagctatggtttttgtggaacttctcattctgtgcttttccgatttgtctggtgctgaaaccttttatttgtctttctttatgttgaagaactcactttttagtacctaggagcacacatcattgaagtggtttggattttttataccagaaatttcaaccatagtagtaactatagtagttaatggtccaggcacaaggagccagtgctcagctgcttcagcaaaaccatgtgttttcctcagaagtagctcggtactgagggaatgatagcagaaccatcacagcagtgcttctagattgtacccgggtatcccacctcttagcaccttaccaggccctgttttcaaagggtgatcattttaactattagggtatcttccttcttatcactggaaattggtactgtggcagtaggaggaatctttgaactttggtttcaagggtggtggtaaactagtccatctctagaaaacactggggattagaaatctctgcccttgcctttgactagaaggggcctgcatatgcaggcaggctctgcagctcattacccttctgggacttaaggttaggcttcgtggtcttggttctgaagtcagcgcacttgaccccagaccttctcctagtatctgccttcttagctttctcactgatcatctcttttttttttttttttttttttttttgaggctgagtctcactcaattgctcagactggagtgcagtggcacgatcttggctcactgcaacctccgcatcccaggttcaagtgattctccttcctcagcctcctgagtagctgggattacaggcgtgcgccaccacgcccagctaattttcatatttttagtagagacagggtttcaccgtattggtcaggctggtcttgaactcctaacctcaagtgattcacccacctcggcctcccaaagtgctggggttacaggcatgagccatcacacctggccttcattggtcatcttttaagatagaaaagagaggtcaggtgcagtggctcacacctgtaatcccagcactttgggaggccaaggcaggtggatcacctgaggttaggagttcgagaccagcctggccaacttggcaaaaccccatctctactaaaaatacaaaaattagccaggcatggtgggcacctgtaatcccagctacttgggaggctgagccaggagaattgcatgaacctgggaggcggaggttgcagtgagccaagatcgtgccattgcactccagcctggccaccagacaagtgaaactccatctcaaaaaaaaagaaaaaaaaaaagagaacaagatcaagaattcatttttttttaaattactaatccacttttcttaaaaattcttttttttttttttccgagagagtctcgttttgtcacccaggctagagtacagtggcgcaatctcagctcactgcagcttccgcctctgggttcaagggattctcctgcctcagcctcccatggacctggaattacaggcaagcaccaccacacccagctaatttttgtatttttagtagagacagggtcaccatgttggccaggctggtcttgaactcctgacctcaagtgatccacccgccttggcctcccaaagggctggaattacaggcatgagccgccaggcccaaccacaaatttctaatgaataagataaagcaatcctgctgaccacctttcccaaatccagtcctttttctagaggtatgtatccttttcagagtgtttttggtgtacttatgggacataaatagaatcctgtataaattgtgaaagaaggttttcctcaagtattccactcaatatattgttctggctttttaaaattaaatagtatgtcttgaaaataattccatataatccttctcgtttttataatatttatcaccagttgtgatgaaattccggttttgccaggccaggtggctcacacctgtaatcacagcacttagggacgtcaaggcaggagagtctcttgagcccaggagttcatgaccagcctgggcaacatggtgagaacctgtctctacaaaaaaaaataaaaaattaactgggcatggagcactcctgtggtctcagctattcatctgtgggaagctgaggcagaggaggattgcttgaacttgggaggtggtgactgcagtgagctgtgatcacgccactgcactccagccagggtgacagagggagatgagtaccaaaaaaaaaaaaattcatttcaaggtcatggtgataagatatatatcaaggaaataacaatacagtatcctgaaatctaatacgtgtttgatgtttttacttgatttttgtcctgctaatagaatgtctggaatcagttgagaagaaatatcataagcattctaaggactcctgaatctaacccattaaaataagtccagattggttttctaatcacctaaatgtgggtattattaatcaggcttaaaaagtgttatcaaagcacgtcaatcacagagctttataagtaactattcaacacgcaatcctttctctaatctttttttttttaattgtattagagcagttagactggtgtgagaacttaacagtttattaaaatgtaaaatattagtgatgtaggcattttggaacataataaaatattggatattggtcaggaacaactgctttaatactagggtatcttgtgataacattgaatataatctgattttcagaggttgtcttaacccacttcaaatagtaactcctttctggctttcctgaccttccacctcttaagacagaatttctgattttttacagacttttgataatagaatcatcacaatgctgtgtaaaaacatacaggatccattttttttttttgtaatttcagcacctgataccatattgcatgtttgcattagattgtgtatacatttaatcttttctctttttctctcttttttgggaatgctttctttgtgtcaagcactatgttacctaataataaactataactaacataaataaattgcagtgttattactacaaataatttgcaaatcaaaagtccagcaatgtgaattaattttgaatagtagttgggtaattctgactacctggattttcttactttagcaataataacaaaagtaatttcaaatgattttttatttcctagtgtgactgtgaaatactatggaaaagcatctcattctgcttcttatccctgggaaggattaaatgcattagatgctgctgtgctggcctataacaatctgtctgtgttcagacagcaaatgaaaccaacctggagagttcatggtatgaatgtcaaataccttctataatagatggtgcttgctatagttcagtgcagtataattatttaatattcaatttttaaaaatttggaaatatttttgtacttcatatgaatattctgatttttaagcatattttcagaaattcatgtgacaggatactaagatgtttgtctatatagggttagaaagacagttttgattattgtacataaatggaatgtcatctttgagtatcaaagataaaggttttatgtaaggggctgtgttctttcggtgggtgtttgaaaattggatcttgattttccagttgtcctcattatttcttaatgataaccaaattttgtcaattaaaaaaaggtataataactgctagttttatttaagtgctgttagtcctgagtaatatctttttgtgtgattttttgtttttgagacagtcttgctctattgcccaggctggagtgcagtggtgcaatctcggctcactgcaacttctgcttcctgggttcaagtgatgctcctgcttcagcctcccaaatagctgggattacaggcaggcagacaccaccaaacccagctaatatttgtattttttgcagagacggggtcttgctatgttggccaggctggtctcaaactcctggccttaagtgatctgcccacctcagcctcccaaagtgctgggattacaggtgtgagccaccatgcctggtcctgaatagtgtcttttaaaattatatatatatatcaccataatataaatacagtcaaagtactgtcttgaaggcacacatttgtttaatttatttccttatgatttaggaaattgttatattttaatatctattctttacctgattttgctatagcctgaggtcaatttgtaattgtacttttaccagttttcctgctttagtttctttaaaaggaacaaacaggaatgtgtagaaatatttttttaaagtaggtcataggacattggattttttgtatctattttagttattacttcgaatgaataaatcttaattctttataattccaaataaatacatttgttttgacagttgataatacttagtgatctttgacctgcattggtttttttcttggcatgaaaattatttttcctatagctaaatgccatttaaaatgctcatgggattcctgaggtatgagggtaattatagaacctcataccattgttgaggtatggtaaaatcttttccagaaagcttaagatgttactaattttttttgtggttatataatttctaagtttcattatagtctggatcataatttcttaacattatgtaaattcttctgaatgaagtgcatatggataattattttttcttatcagccaaaaaatatcaccctatgtaaagaaatttcagttgtacaacataacaaaatctttgattggtgtattggtggagctagtgagtttaaattatttttctttatgaacatattggctgaaaaacttaatgggtgtatttaagcttaaagaaatggtcaccaagcttaattctagtaatttggttctttttataggtataataaaaaatggtggtgtaaaacccaatatcattccctcttattctgaattaatctattacttccgtgcaccctcaatgaaagaacttcaagttttgaccaaaaaggcagaagattgcttcagagctgcagctttggcttcagggtgcacagtaagaacttttaaaagttaatctaagttacaatcagaggtatatatgtgggctagcactgttagattgaaatctaacttgactctcttatttggtgacatgttgaatatgcaaaatgaattggctgaatagttaatgtgaaagtctttaatttttacacgtttcattcctcagtgcttgcaatagggaagatgacaggtcatcttacttatatagtaattagaataattctgatacttctatgctagaatccctgcctttttacaagttatattcttccttgtcggcagttatacttttagaattgctatatgtagtttctataaaggaaagtttatggcaaaatcagcaaaagctttttttttttttttttttttttttttggtggggggacagggtgttgctctattgcccaggctggagttgcagcggcacgatcttggctcactacaacctccgccttccaggctgaagcaatcctctcacctctgcctcccacctcagccagctgagtagctgggactacaggcacgcaccaccacacgtggctaattttttgtatgtttttctggagacagggtctcaccatgttgcccaggctggtctcaaactcctgagctcaagtgatccacccacctcggccttctaaagtgctgggattataggcatgaaccacctcgcccagccagcgaaagccatttctgaagttagggtgtgtatagtagtgatataaatactatggcttgctggaatggaagataaaatagacacagaagttagttaagaggttttattgatttgtttctgtttgtttgtttgtttttgagacaaagtcttgctctattgcccaggctggagcgcagtggtgcaattttggctcaacgcaacctcctctgcctcctgggttcaagcgattcttatgcctcagccttccaagtagctgggactacaggcgcttgccaccacacctggctaatttttttttttcttttttttttttgaggcggagtcttgccctgtcacccaggctggagtgcaatggcgcaatctcagctcactgcaacctctgcctcccaggttcaaacaattctcctgcctcagcctcctgagtagctgggattacaggcgcctgcctccacacccagctatttttttgtatctttagtagagacgaggtttcatcatgttggccaggctggtctcgaactcctgaccttgtgatccacccacctcagcctcccaaagtgctggaattacaggtgtgagccaccacactgactggttttgttgatttgaactataaagttagtatttaaaatcatgtactgtgtaaagtggagtgagttttagaattatacaagataagaatcttgccctagagggagcctgtagtctagttggagagacaagatcttgacccataactctcagcctagctaattctgtaacctttagaaatgtttagtgtctttggctctccattttcttgcttgaaaaatggagataataacaatttatcttaggattcttgtgagaattaaatgagataatgtttctgaagggtttagagcccagccttcatttatattgccttatttttttctgttcttattagtctagagatgtatgattgattcacgtagtagcagtatctcacagtagcagtaattctcagaaagcatatgttacgtgtcctgagagtagtgtggaatgtgtcgtgaggatcagaggtgggaaagagtggtctggggctgttaaccttggaggaaggttttgtggaagactgtagacctgaactgagctttgaaggttgatcatactttcagatatgcatgggaaagacagagactgaaagttcttagggaatatagtcagcaaagataagaatatagaagctcgtgttgtgttgtagttaatcgataaacatatggacagatgtaggagcaaagatgtattctcatatgccactagagaagatggttatagtgaatgaaaactgtgaaatgtccatagctgagggcagtaaaaactaaatatttattcccttattcatttataattataaatatttatttgtgaaatacttatggatgtgaactattatcattaggcaatatctcaaggtatacagtattcccttatggtaaggtttgttgttattggatttgaatctatatttaatttaatttatttatttttaaagttttttgtagagataggctctccctgtgttgcccaggctggtctcaaactcctgggctcaagtgatcctcgtgctttggcctcccaaagttctgggattgcaggtgtgagccaccttgcctggcctaaatctatattttaaataatcttttagtaatttcttatattttggctgacttgtaaggtctgatttggttgtcataatttctaccgtagatgttgctaagaataaaagaaatgtcatctctgccattttatgattggcttttgctaatattggtttgagggaatattgccaatttttatttaatcaaaactgaatctgtaaatccacttaactgggcacataaaagctgcttccgtatctttatatactgaaattaataaatgaggactgttgtcaacccttcctcattgcaaatcttctacatttccctcagagtacttttctacctctcacaccaggcagtgatgtcagtgtcagtttgcatattgaatattagtaaagcttaatttcttttttttggagactgaatcctagagcagtgttcctcagagtgtggtttttgggtcacctatgtcagaattactttgaggtgctggttaaaataaaaattaggctgggtgcagtggctcatgcctgtaatcccagcactttgggaggccgagacgggcagatcacatgaagtcaggagtttgaggccagcctggccaacatggcaaaaccccatctctactaaaatacaaaaacaattagctgggcttggtggcaggcgcctgtaatcccagctacttgggaggctaaggcaggagaatcatttgaacctgggaggcggaggttgtggtgagctgagatcacaccactgcactccagcctgggcaacagagtgagactccatctcaaaaataaaataaaaatttctgggcccttctcataccctatctaggtgactgaagttgacacttggtagctagtatagagcttggtgacattgtggggtttagtgtatatatagcataaaagagagtcctaggaactctcgttatagaaaataaatcttttttcttttttaaggtaagagatttgagagtgtttatatctggaagggaaagtatcttctcttaaaacctcttcctattagagaacaatcactggtttgaaaattagatagtgaatttgagttttttatttcaaaatttgttttgcaattttttattaggtggaaattaaaggtggagcacatgattattacaatgttcttcccaataagagcctatggaaagcctatatggaaaatggaagaaagctaggaatagagttcatttcagaagatacaatgttgaatggcccttcaggtaattaagtgtttttttatatattgagctatttgaggaagagaaataccatctttggttaaattggttgtatttaatggtttgggaggtcgggaggtactactgacgtttttaatattttcacaaactttatggttaggggaaagaaactaatggactcttaagtgagtgtagaatgtcaaacgagcagacttgattttagaaatagtcaacctacatttttgtctgtattctaaatattttctagtgtttaagtttcgttagttttaatttttaagtaagttgctaaggtgggatatagaattttaattcattctcagtcatcacaataagcaggttactaagtacttagttatctggggcattttcagtttctgaggagcaacagacagctagaattgaaataagcatatttggggttatgttagtttttttttccttttaaaagcatattattactaatacatttgcaagttagagatgtatcatctgttttaaaaatagatgttgttgaagtaggcccaaaaggacttggtggtgaaaatggggtgtcggtgtcattcattaagataaggagttcaagagaaagagcaggttagggtaagagggggttgttataaattattagtatgttaaacttgaggtgcttatagtatttctaagtggagctgttcagtacctgttaaatctagaacccaaaaagatgtctagtttggagatttaggagttgtccatatatgaaaggtatatagaagacatagatgtcgatgaggttgcccaaatacatagaggaagaagattcccagagatcagacattggcagtcaacgaagtggtcagagagaaagccagacaatcaggagagaggagaagtcatggaagccaagggagaagaaaacttacagaagagaaggaggcataaatcatgtcaagtgctgtagagactgaataagatgaatatggtctagtgtccactggactctagtaattagaaattcatgaattgtctggaagaaaatagtataagaccagtggtaccagatgctgggtctcacttctctacccagggcattgactgctgagatagtggaagtagcaaatgaagactattctttttcaagagagttagctttcaaggaaaatagaaagagtggatacaagcttgagggaaatacggaaaagaaaatagtttttaagggaagatacttgagaagtagatgtaatgtttaggaaggaggtcagggagttcagagactttccctctaggaagtagcacacagtgagcattgagctggtagggctgagggattgagagagaattgccactgagaggagttgtccagggacatcagagtttcatgttttcttttgttctggacagcaagaaagctcagctcagcatggttctgttcttttaccctagcaggtttctgctgtctagctgaagaagggaagacacatggcctgctctaccccgggtttgggttttatataatggacaaaacagtaggataaagtggctgtgattttggtatgatttgtgggctctagggtctagttccacaagtaagatcttaaaatatgcaacaggtttttttttgtccatccttttttgttttgttttgtttttacactcagactctttagactctttaaacactggagaggctttttccatcctgttcactgatgtcccattactgtgcatcctcagtgtgtggagccgtttctggcacagttaagtgcttagtgaatattttctgaagcagtacttctatagaggctactatgcctcaaagtctggcctcagtctgcatttaccacataactagcagctgtgagactatcggcatgttatttaatacccataagccttggtttcttcatgtttaaaatggaaactgttctaaatattaatgagaatacatacaaagcacttaggattgtgtttggaacgtagtattccagataaatgttagctactctttgtcacatattcctttattctcttaccaatcactgtgtagtctcactttgcctgcatggtgtttgacatgtaataaacattcagtaaatatccattgagtgaacataaggctttgtttttactgtgatttattcaacaagtgcctgtgtgtcaatcctgtgagaagctagatgcacagtcatttcaaatactatttcttgcctcatacagcctcataatttagtttctgacataagcatgaaccaaatcatccaatacatggaaaattaaaaagtactgtaaaggagagtaatacatctctgtgagagcttatgctagaggaatttcactttatgggaaggtgaagtaagtaaggctttgctgaggaaatgatgcttaagatggaatttgaaggttaagtaagagttacagagatgatgcagggatagcatgtgcaagggtcctgtgacagggagagcatggtgagtgtctagagcggctagggcatcgagagtagtgggaacatggtatgagatcaggttggaaaggtgaatgaagattgaaaaaaaaaagacggcaaatagagtagatgctgctagaccaattaggaaacttctagttcaggcaagagataatgatagcataggctgaggacaggtgttggtgatggtgatgcaaagagcgttaggattctgagatatttggcaggtactgttgataggtggagtggaggtagaagagaaagatcatgagtttgactttagatatgttaagtttgatctaccttgaagacatccaagagaagataccaggctggcaactggatgtatgagcatggaacttagcagagactgggaagagatttgagttggtggtgatttgaagcaatacatacggacaaaatcttgagaaagaatatgcagtaagaagagaaaggggcctggaatggagtctcccgtaactattatttcatcgtcaggtagagggggctctatccccaagagagacagaagaaggggccatcagagaggcagaagggaagccatgcaagtgctgtgtcacagaagagaagaaagggagtaggtggcagtgtggagtgctggccaagagggccagtaaaagccgtgagacaaggtgagggcaggtttgcagtgaccttcatgagagatgtgactgatacaggggagtgggtggcagactcagtggaaggtgagcccatgaaagcatgagcatacggacaactctccaagaagctcacttctctgcgtctcttctaacagggactgtgacttcataactccagaatacttaaccacatatacttaaatagacttttcttaactttgtgtgttccaaggatctacggattttggaaatgttagttttgtggttcctggaattcatccatattttcacattggatctaatgccttgaatcatactgaacagtacactgaagctgctggtaagtgttgttggatgtgactgttttggcacacacactcttcttctggtagtagctgcctttctgtttaacctactatttcactacataacatcacctcagtaaatactgcactgtggtgggcagttggagagccagttgagatacgggtagctaacctgtgaaattaaatacagcttaaataagtaaggaggtattttattttctctaccttttagggtcacaggaagctcagttctacactctgcggacggccaaagctctggcaatgacggcactggatgttatttttaaaccagagttactggaaggaatcagagaggactttaaactgaaacttcaagaagaacagtttgtaaatgcagtagaataaaagacttaggggccacttataaatcaagaagacgtgatgatttttttcttttaatctcttttaatgaaggcatgcttgttttttaatcttaaaggagtaaaattctttttacctgataagtgaggacagggtgtggagaaaacatattaattacctcatatctaaagtgaaaatttttgcaaatccgtacttgataggattatgatattacaggagctggtatgtgatgccattctttctttttttttaccccgcaaccactcaccttcacagtagtgataccatttcttaacctggaggatacatggcatcatttttataaaatatgttagtaaacctttttgtaagccttaaatgttatgtgtatttttaaaagcttaagagatttcaaaccttatattcagaattgacacccatgagagtgttttgtggtatagggtggtaaacttgttctctaatcgtatattaattcctctaccagattgtatatttgaagccagtgtctttcctttttttgttttaagatagagcctcgctctgttgcccaggctgaagtgtagtggcacaatctcggctcactgcaacctctgcctcccaggttcaagtgattctcctgcctcagcctaccaagtagctgggattacaggtgtgtggcaccatgcccagctaatttttgtatttttagtagagacggcatttcaccatgttggccaggctggtctcgaactcctgacctcaggtgatgcacctgcctcggcctcctaaagtgctgggattacaggcatgagccaccgcacccggcctgccagtgtctttttaatacacatgtgtgttggtatttttaaattgttacagtatctagcatattgcttactctgaatattcagtactttttgaataagcaaatattgcttccttgcttggaatcatcagagtttaaagtagcttcgtggatggaccatgatcctaagatgagttttaattttgtgtttacagtcatctcttgtacaacgtggagaagaaaagatatacttactactttgcttcaggtacacataagaaaacctcttttttaaaaaaatttttatttttttacataatagagacaggggctcgctgtagcttccaggctggcctcaaactcctgggctcaagcaatcctcctgtcttggcctcccaaagtgttgggatttcaggtatgagacaccacacctgcccatttttgtttggttttttaatgggcaggttcttgctctcccaggctggagtgcagtggtgtaatcacagctcactgcagtctcgaactcctggactcaagcagtcctcccacctcagcctcctaaagcactgggattacaggcttgaggcactgcacctggccctgaccattttttaaaaaggttaggcttagtgcaaagtttaaaattatatgattcttaaaatactgaattagtttctaaactaaactagaggtataggtggacctgcttgaggtatctttgtttttatggaacatttttattacatgcctttataatttttcattgttcacaccctgtactgaaacctttttctcaaataccaactcttggctatgttaaatttgtagactttaaaagatgttatctaaattaatggtttaaatatacaaattgaaaatattttctttttagtggcaattttaaaagcaggccttaatatgggacctgcttttaaagtaaaatatgtggtactatgaattactaaattgctatataccatgtaatagtgagtatagctaatatttagtatgccttttaaaaattttggactgcttttcggttttaacaaattctccacatgtgaactactcaagaaattttccctttttaattgcctctatagcactcataagagctagggcattaggataaactagaatattttatgtttatgaatacttgtataaacttaaaagtgttttgatttcccacaatttcccaaaggaatgtttatttattaagagttgtgttgataatttaactgttacaatttcagcagttgaattcagtgaacactggttgaggagtgcctatttctaagcactgggtgtaagaagaaaagacacttgcaaaggaagagctaagattaacataatttctttggtttttctattgcttgttattattatgtaaaaactgggtggcagttcacaaggaagattgttgtaacagaagagtgacaaccaatagttttttgatcattaaatcaaattttgtaaacagtggcaggagcgtggacttaaaacaaggcttgcttatttggttttgtcaaagttttacgaaaatatatgatatatatttatactaaaactatataatccttagatttaggaaagcaatcagttaatgtctttagcacactaaagcagtattaaacacaggtacaagttggaaattgtagaaaactgaaagaaaacaagacaaaatgtctatggtagggaataaaagagtttaagatattatgtaaaattatgtgtattttcttctcttttacataaattgtttgtgaaaagtgtgctcaacttttttacaagagtgatattaacttggatttatttttcaatataatttggagaccctttgttatccaaataaaattgatgagtttctgtgcctgtaaaaaaaaaaaaaaaaaaaagaaaagaaaagacactgttgcatgccccagaaagcttgtggtgggtggtaagttctcacgagatttatttatctgagcaacattgggactgagggaacatctgaaagctaccatcttgaaaatttttgaggaagtgtttctgaaatatttaaaaatacttaagtcagtcattttgaacaaaagaaattgatacaataagtttttttttttaaggatgattgtctaattttgtaatatgttgttttttaaaaacctgtctgatggtgttttatacatttctaactttttacctgagttatctctttagtcttttggaaaataccctacacaatactaacctttaaaactatcaaatttttgttataagataaatgttatctttgtactagatagcaaccctttataaggttgtaaggtataataaactgcttatttttttacatacttcatatcaagcattttgcagtccaattatatagttgaggatggtgtattttgatatgtatgaagttaatattttcaagtaagcaatcagtctactaccatcagattataagcttttttgtaataataggtacataaaatgtgtatgaaaaatctacaataaacatgtttatctgata

SEQ ID NO: 320 - DNA, 108383 bp, Homo sapiens
gattgccagggccgccctgtgccctctggctcggcggtggtgggcgagggctcagggatcggagaagtagcgtcttcccgggggtgccgaattggcggggctgggggacgctttttttcaccgccgcccgccgagactacggctgcccgagactgccgccctccgacagcgcccaagcctccggccgctgcggccagtgggccagggttcggcgagccttccctgccggcgccggccggctgctgaggcgctgggaggagctgcggagggcggggactggtgtcggagaaggggcggggtgggaacgccggagagaacccggtggctgcacagacaaaaaagccccgaatggctggagggcgttcagctgttaacagccttttggggcagagcacggatttgacagctccacaacgtgaggatatccactgaccccgcgagacggaggagaacgcttccccgaaattctctgcccaccaaagccagcgctgcaaggttgcaactttcaaactttgtttttccagaaagaagactgccctttcgtgtacaaggagagggtgagagggtgacctagcttgtagatcggctgaaggcaccagtggttccaaatgtcacccagatgtgtgttttcatgacgatttgatttctctgattttatttttacatttttcattttaaaaatacaaagcaatttttttggggcatgctgaaaggtaactgaagaccgcaaaggaaaaactattgtcatggctgaaggagagaatgaagtgagatgggatggactctgcagcagagattcaactactagggagacagcattggaaaacattaggcaaaccattttgaggaaaaccgagtatcttcgttcggtgaaagaaacacctcatcgtccatcagacgggctttcaaataccgagtcttcggatgggttgaataagctacttgctcatctgcttatgctttctaagaggtgtcccttcaaagatgtgagagagaaaagtgagtttattctgaagagcatccaggtaaggaagagcattttaaatacaactatgtctctactacagttaaattttacttgccgttattcacgttgtgtttgtttctattaggttgttatgtaaacttttattatgagtttacatctttagagtgttctgtaagtaaacaagtagtgtttttctagagttttaggcagaaactgctttgctcctggaagaatatatgaaaactacagttaattccaagtaaatacttgtttttccttatatttctttttacatgttgttggaaaatgtagccagtgtttttttttcacattgtcacagtgttctgagtgtaaaggctcacatttaaaagcctctaaaatgataaaggatattaaatgtttcctagtcagcctgttcaagataattggtggaacaattttctcttatttttaaaaacaaaacaaaccaggatgtgttctctaaatgcaacctctcttttttcaagaagagaattatataaaataataaaaacctatcttaaaagaagctaatatcttcatgttgaaaaggtggacccaggtggggtatttgatagaaacacttttatggcaaattgctcaactagctttctctgtgtttgcctgaattgtttctttttcacatgtgtagctatttaagatacgagtgcagcaggttaaaaatattatagtttttcctccatttcgttcataatttatcctgttttattacaaggtgtcttagaatacttttttttaagtttttagatattgacaatattcagcaacaccttatatatgcttgtcaatctttacatttctcaatccacgtgtgttgtccaaagtcctgtatgagagatttttaaaatttaaaatgtacttgggtaactatgtaagttaaaagtgacagtttttatatactggcttgaatttagtttaaagcaacagaaaaataatatccacaaaatgaagactctatttaagatcttgggatatttcttctcactaacactttggaaacaattgttacaattcagagttacccgagaggaattaatatactaggtaactgaagtttaccctttgaaacacaaaaagttatttctctatcttctagactgtagtgactgtaacaaccatttttgtccataatggggtcatcattatgcatatcaactattgttgtgcagcaaagggtggaggactgactatatgatccattagtttttgtatttttgtgtgtaatttttatagtttttctgttctttcctttgccgtcaggatacttgactttggtctcttcctgatctttcattttgctgcttaattcatattagaatgggaaaccagataaccaatcgtgttaagagttatattgaaaataaaagtaagcaggctctggggagcatagtatcaaaggatttcaatataatgataaataagtgggtactggagtcagagttgggctcaaattccactcctttactaatgtccttgcctgtaaccttgggcaaattccttgacctttcttagcttggatttccacatctgtaaaatgggaataacaacacagagctcttgtgggaattaaatcagatgtaaagtactctggtatatatagtagatgctcctctccctttcataagtgaaatacatagactatgcaatatatatttcaagactctttcatcctgcaaaaggactcaggaatttcctgggaaggttccctatagacttatactctttttttccatctctgcatctattgtacaattataaaaggcaatttacttatattgtgttataagcacatgcttttgtgtctgtctcccataggaaggctatgagttcttaagagtactggctgggacctggaagctactaaataaatatccagtggatgaacaaatttatactttctttctgtttttcatcagtagtctgaatagatgaagttttcagtttagggagtttccaccccagcatcattcatttatgcttgcagttatgcaacaaatgtttattgaactcctgctgaatgtcattctgagaactgaggaccagtggtaacaattttgacatcataccaaagggaaacagaccataaagaagtaaacaaatataaaatttaattttagatagtaagggaaagctttcctgaggcaatgacatttaagcagagacatgataaatgaataaatattacccatgtaaaggtgagatttgtgaggggacattccggacatagggaacggtatgtatgaaggcctcatgccaaggagagcagatgagttctaggagctgaaagtaatgcaatatggctggggcagacagtttgagggtggcgtgaatagcttaagaggacatactctggagtttggcagacctggctgcgatactgtcatgtgtcacttaatgatggtgatacactctgagaaatgcatcgttaggtggtatcatatttgtttgaacatcatagggtgaaatcacacaaacctagatactacacacctaggctatgtgttatatagcctgttgtttctaggctacaaacccgtacagcgtgtcactgtactgaatacgctttggcaattgtaatgcaatggtaagtatttgtgtatctaaacatagaaaaggtagagtaataatatagaattacaattgacccttgaacagcataggtttgaactgcatgagtccacttataggaagattattttttcaatagaagttatactaagttgggcggggtggctcacacctgtaatcccagcactttggaaggctgaggtggaaagatctcctgaggtcaggagttggagaccagcctgaacaacatagcaagacccatctctacaaaaagtcaagaaaaaaaaattagctgggtgcagtggagcacacctgtagtaccagctattcaggaggctaaggcaggaggatcgcttgagcccaagagttcgaggttgcagtgagctgtgattgtctcattgtcctccagccctctggcgacagagcaaaaccctgtttcaaacaaacaaacaaacaaaagttacacttgagtatgcctgcctcttctgcctctccttccgcctattccacctctatcacccctgagatagcaagaccaacccctcctcttgatcctcctcctcagtgtactcaaagtgaagaccgtaagaatgaagatcttcatgattatccacgtccacttaatgaatggtaaatatatgatctcttcattatgattttcttaataacattttcttttctctagcttattttattgtaagaatacagtatataatatgtataacatacaaaatatgtgttaattgactgtttatattatcagtaaggtttccagtcaacagtaggctattgttggctaagtttggagggagtcacaagttaaacacagattttcaactgtgtggagggttggccccctaacccccttgttgttcaagggtcaagtgtgtaatcttatgaggccactgttgcatatgggggtccatcatcagctgaaatgttacgcagtatgggactgtactttattaactctacaactttgaataagttacataatctctccttgattcagtttcctcatctgcaaaatgagcattatgcttatggttcctgcctcacaatgttgctgtgagaataaaataaatgatgtttgcaaagcatagcacagtgcctagcataaaagaaatgctcagttaatgttaggtatgcctgctattactaggcagaaaccagatcccagaggggcttataggctatttaagggttgtggactttatcatagaaataatggaagccactgggggattttgagcaaggtagtatagtgattgatagtgtgtcagaaggatcactctagagaatggatttccatggtcaaaagtggatgtgtgacatcaattaggaggttgtcctactagcctatgacaaaagtgatagtggactaggatgtgaggtagggcaggagggagtggaaaaaattaaaatgggtctgatagatatcaaggagttagaaaccacaggatatagtatttagttggatttagaagatgaggaaaataacaaaattaagcatggctctaaagtttttggcttgaggtacttggtgaattgtgcaattgttttctgagacaaaagagtggcagggggtcaatttaggggaaaaatgactgctgttttagacatgttgagtttaagttgcctatgagacatccaagtagaaatagctcctaaatgaatttctgcccccgataccgctgttctagttctgtcactgctatgtcttcttctccagattaaactcaccctccacttttatatctatcctccacatagctgtagagccatttatctaaaatgaaaatctatgtaactttactggcaaaagccctttagaatagaattgaatttaaacttcttaatgtcatatagtacccagcattatctggctttcacttacctctccagcttcactgcctaccattttagcatcagcctcacatgagaaagcaaatattaattcaaatgtagcactccataatgctttctgttattcattagtaaagcagcaaaagctgtggtgcatatgcaatttctgcagctgctcctgaaagcccttaattgctataggtcagctaaaagggctgtagttggcaagggagaaacgatgacaaggtggtagaatgaattcaattccaagcagctaaatctgttaaaaaaaaaaaaaatggacacattgggagatagcatcttttgtttataccccagttctcaatttattgattccacatcagcatgtttaaatatattcacatttttgagaaatattctgggccaggcagtcactgtacttaggacttgaagatcagtaagacttgtttcctgcttttgaagaaggttttctattctcatccaaggctttatactgggtttttaaagaaactttaaaaagaagaattacaccttttgatactcttgattctctaaacaaaggaatgggagtattaatactggcccactttcctaatatagtctactggtgaactatagtcttgatgatacatgtaattaaggaggaaaatatgagagcacatatgtatcaaaagattttgaggcctatccagaatagccaagtacttttccaagaatggtcatttggtcattttcataagtttgccagcaatcaatattgtctgaaagtaaattggcttaagatagaaaatttagaataagcaacaaaatacttatctttggtaagtggggtggtggaggctttcatttagtaaagtgattattacccccccacctccaggagaaatgaaactttcgttgctgggtaggatgcacatttatagctgttagagttacagttggagttgcagtatctagttgctatccaattgagtaataaatagattgaaaatgtaacaataagtttattatttcacataataagtctggaggttggcagttccaagcttgattgattcattggctcaactacattacttgtctgctttcttttttttgttctccttcctcagcatagcaaatgatgtctccattcctacagcatgctattccaggcaccatgtgcagacatgactatctgcagctaagaagaaaagagtttcttcccacgtctctctctcggggaagaaaacctttcccagaaaccctctagcagacttcctctcagtttctattgactgggattgggtcacatgcccttttctaagccagtcattgatgaagaaattgggcatttctatttttggtttggactaatcagcattcagcccctaaggaccaggagacccgccccctgcccccccatcacttgaacagaaaatttctcgatgaggagaagcagtacagaaggcagtcaggcctaattagaggcttccattaaaactgcatgtgtatctaactagataatatatcacttggtctatttataatttggatccgattagattagaagcatacttaattcatttttagtggggctataaaatataacagattggagacattctagaagcagatttggtctttttaaatgattgttttgttttgatttttttttaactgccatttagtggagccaaaagtctaaggtagtgcatgtcaaacattcactgctgactcttagatatcacagcaaatatgagagtcctctttcaatatttacactaagcttctctcttccataccactattttctggcctttcttattttattgatacgttgtgaactcggtccctttccctcagaaagccttgtggcttacttctcattgcctcctctcattcgtgtctttgaccactttccttccttgcttttgaggctcagagaatattctttattctcaggttttctgtccttctttggataaagaatgtgaagaaactgaaggcaaatctttaactttttttttctaaattgtttgaagacagccaattttttttcactttctgacttacaggaggaatcatatctgtactatctatactcagtgtcttctttataatatataaatacatcctgtcctatgttttgactcttcagaaagatcaaaattaacaacagtactctttatgtgttcagatttcgtctattttattttatttatttttgtttatttatttattttgagatgctgtcttgctctgtcgcccaggctgtagtgcagtggcacgatcttggctcactgcaacctctgcctcccgggtcaagcaattctcctgcctcagcctcctgagtagctgggattacaggtgggcgccaccacgcccagctaatttttctatttttagtggagacagggtttcaccatgttggccaggctggtcttgaactcctgaccttgtgatccacccatctcggcctcccaaagtgctgggattacgggcatgagccacagtgcccggcctgatttcatctattttattcctgttggagtgcccccattggcctctaacatgaaaaaaactgattcatttaaaaaatatttttctaacatagttattttgtttacaaatgggatatagtattttgtacaaagatgttaaacacttgcatagtaaattttactttaagatcatgggttgttcatgacatcatgaaggatcctctaaaacaatggcttaattagaattttttctcattttcaacactttgtgtccttaaaggtgctgtatgtgcagaccattcatgaagtaaaagaattagaaagtaggtgtactgttgtctttgtttagagttatatttatttttctcttgataagccatgagaaatttgcaaaatatctttttaccatttgaataggtaattaataattcaaactgctaacttaaggattgttgaaactttggtctgacagaaagtagctgtggaatcttgggtataataaaggattctttttgttttttgagatggagtctcactctgttgcccaggctggagtgcagtggcatgatcttggctgtctgcaacctccacctcccgggttcaagcagttctccctgcctcagcctcccgagtagctgggattacaggtatgcgccaccacacccagctagtttttagtagagatggggtttcaccatgttggccagactggtcttgaactcctgaccttaagtgatctgcctgccttggcttcccaaagtgctgggattgcaggtgtgagccaccgtgcccggcctaatacaggattcttaatcacttaaaattttaataaaatgggcactactttgggttatgtattaatcatgaagaattttataacttaaaaatagtcagtgtttatgttgtagcaaattagcatggactggaaggaaccatagacatgagaaaaatcttagaatttgtggaagaacagagttgatgctggtcagggagggcagcgtgcttaaagtgcttagaaggatgaaagtgctgctggaagtacatcagcaccaagcaagctttgccaccaattctaatctctgctttgtcagaatttctcaaatcagtttattttttcacacgatggtaaaatatctaaatttttaaatagaagtcagtggaaaatagggtttactttgacacattgtttctagctcacatttactacattaagtgagaaagatttgaaatgaccttaaagaaattacttagtactttaattaggctggcagaatatactcaggaaatcagatttcaaggattcttcagaatatttggtgattgtatttctgtgtgtgtgtgtgtgtgtgtgtgtgtgacggagtgtcactctgtcacctaggctggagtgcagtggtgcgacctcggctcactgcaagctccgcctccggggttcacgccattctcctgcctcagcctcccaagtagctgggactacaggtgcccgccaccagacccagctaattttttgtatttttagtagagacgggatttcaccatgatagccaggatggtctcgatctactcaccttgtgatctgcctgcctcggcttcccaaagtgctgggattacaggcataagccgctgcgcctggccagtgattgtatttctaggggcattgacacactagaaatttaggtatgaaatccttagctagatagtcacactatgggaacattatttttatgcttgtttttttttttttctgttggttgctacactgataagccagtgtcaataaagatacatgtaccataaagttactgtataaaagaaaaaaaaactttaaaagatgcttgtttttttaaaagtgcgtttttcgctggagatactttgagagtttctgtaggatgactattaggagcatttattagattttcccagttggtattttattattaaaatctgtctattacgagtagactcacagtttgtggcacacttttcaaataaatagattaaaaacaacctttagtttgtaacaaaaaaattcatgttaaatttggcaacataataattatctgtcttctcatgttctaatgtcttttatataaagaaatctgatagattgtaatgaaatagggaattaccttggaaaaactagatacttttagctttatattttacataaatattaccttatttttaattttaaaagttagaggtcttcttagaattatacattctttcatttattataaaatcaccttaggacaattcctaagcttttatttattttttgtttgtttgttttgttttcttttgttttgtttttgttttgagaccgactgttgctcttgttgcccaggctggagtgcaatggcgtgatttcagctcactgcagcctccccctcagggttcaaacgattctcctgcctcagcctcccaagtggctgggaatacaggctcccgccacgatgcccggctatatttttagtagagatggggtttcaccatgttggccaggctggtttccaacccctgacctcaagtgaaccgcctgcctcggcctcccaaagtgctaggattacaggcgtgagccactgtgcctggcctaattcctaagcttttaaacaatactaaagggaaaaaaatttatgacatgagctttgtggtttatattacccaaataaactttaatatgtatatataatcattcattgaatatacatattcatttagtgaatagtattaatttagtattttaacttgaaagttgtttaaattgacaaactgacaaatatatatgccttgaaaaattaaacatatgggtaggataatttttacttttattgtaatattcagtaaagtgtaattagaatctttaccttactaaaagtgagcatttactgttttgatacctctgtgtttgacaagcactgcacacttgtctttaaattttacatgatttcattttctagctagttggcaggtgttagctgtctataattataactgagtaatttttcaaatgctattcatagcctaaacacagcaagacattcttccaatcatgtgataaaaactgagccttgcaaaatagtggtagagtgatatgttcaatggtaccgaaggacatatttaagagaagcctttcaaaagtaaaaagtaatttaaatgttagggagacaggttttctcacagtgtaagatctctcaaagtcattgatagtgattatacctcaaattaagatgtatctactttctcattgaacaagttaaggtatacattgactgacttaaattataacatatgacctttgttgatgacagtcattctgagtatgaaaaattgaaattttgttgagacaatgtaaattttaccattgaacctaatgaatcatttcttctcatttcattcattagatttgtgtatgtgtgtgtatctactatctgccaaaccctatgcttatctattttttgacatgggaaagaaaaggctatgtatttcacttaagtttaataaaggttatactttaaaaaacaaaagaaactttttatttctgatttactttatttcctaaccatctattctaagtatccacagtctcactttgactagagatcttacttcagaatggtgtaaaggtcatgttgaattttcttactggccatgtgctcatgaataaattaacctctacagtctcagtttcctcatctagtaattgacattttattatctcccttgtggtatggttctaaaaattaagagatgacattggtaaaccattttgtaaactttagtatactgtacaaatttaactgtgaataaactctttgaacctttgtttacttatctgtaaaataataataatacttcatacagtgggtttgagaattatttgaacgtgtaaagcatgtagaagtaaacctaacacatagtaagtgcacaacaaatattggtgatgattgtgatggtgatgataatgatgcatttgatctagatcttccatctaatgagtcaaacttgaaactgccattagtttagaaatggatacgcttgatttttacgtgattgactttcatacatcccgcactttatccacatgtattgaaaatccctaattgccttttgtacattaaattccattttaatacatcgtgtcatagggtaccactgccccagtgtaagtgttagtagttgcccaaagtgacagcagatctggagcaaccagcccttcattggagtccagcatcattctggtatgccagcatggcaccagcagggagaggttgcagagaggcagctgcatggatcatccaggtgatcaagtgcacatggagagacccatggccaaagtttgtgcttcagtacctggacagcattggaggataatggtcaagaccatgggctgtgaagttagtcagaccgggtttaagtcctgctctgccaaactgtgtgactgggcaagttacataacctccttaagcctcagttcccttacagagttatgagcaatgcttactggaacccagtaagcactcagtgaatgtgagtacttagtattctattctgcctccttcctctaggggaggagataggaagttgagccctctagcactatatgcccttagagcccccaagtctccagccaactgagaaagttttaagctactttaaaggttcattggtcctaggggaaatagtgcctctaggaactacaaggattttataaatattgttttagctctctgggaactggatttcccttacactgagttagtctcttatttcacttataaacatttaaatttcaacgtgtcttcagggacacataatataggaaagcaagtgattgtttgtatgccggtattgccagtaagcaaccgaatactctgctcctggttgattcatgtctagtactccaagcaagttatctactacagaagtttctttccttgacggtttaatgaggacattagagctgccctatcagtgtttctactgtgcttcccccaatgggagcttgacatactaagcagaaagtcttcaaaacagtgctttctgtatcagacagcctgatataatttagaagaaaggaactaagcaaggttgaatttgcttggtaatatctggcaggtgtctttggggctcctgctgagctcccaatgcctgcctagtttatcttctgtgaattggggtggatgggaggggaggggcagaggtggcaccagactttcctgtctgctttaaaatgtgccatgggattggaatcaagttgtcttaaagagccattagcagtctgtatgcttttgaaaacaagaagaaaaggcattctgtatgccacacctaacccttagcccttttcatgtaataattcattcaaccttcccaacattgtatgagtagatatttttattcccattttatctgtcaagaaaaaacaaggcccagatgggttaaaaacttgcccaagttatcatagctaatgcaagttgaatatgtcttatccaaaatgcttaagaccaggctgggcaccatgactcacacctgtgatcccagggttttgttggattgcttgagcccagagttcaacacctgcttgggcaacatagtgagacctcatctctacaaaaaatacaaacattagctgggcatggtgatgcatgcctgtggtcccagttccttgggaggtaaagtaggaggattgcttgagcccaggaggtcaaggctgcagtaagtcaagattgcaccactgcactccagcctgggcaacagagggaggccttgtttcaaaacagaacaaaatgcttgggacgagaagtgtttcagatttcagattttttttttttggattttggaatatttgcatatgtataatgagatatcttcgggatgtaacccaaatctaaacacaaaatatatctgttttatatataccttatcacataatctgaaggtaatttttatgcaatacttggaataattttgtgcatgaaatagtctgtattaagtacttgtgtgtggaatttttctacttggggtgtcgtgtcagttctcaaaatgtttcagactttggagcatttgggatttgggatttttggattagggatgctcagtctgtaagaggaggagtcaggtttaaaacccaggctgtgagactcaagagtctgtgctttccaacattatacctcattatctgaataaaaatttaacgttaagattcctaacagtaaaaatatattactttctttcccaaattgttttccttcaaggtaaaacttaaaacttttctaggggaaaccacattctcagatgttattaagttgcatatcaagttcttatttaaaccttgacccatgttgaaactgatttgaaccctactgaatcttcatgtttcactgtggtgtataattttcattatgttgtcattataaaagttgcctgatcgcaaggattctatggactgagatcctggaaatatggtgtataaaaggcttatttttatattaagagattcctagtaagatgatttatttaatgcactacctaaaagaaaatttggtatatttccatgagcaatagactcaagattagctttgaaagttaaaagagcattctcctagctagttcattgttgccatgacagtgctggcagtgcaagtgttgtagtaactccttgcaatgatcttattttagaccctaacgtttgcagtgctgaacgtccccttccccgccccacaagtaactctagtggaaaagtactggttttataactggcttctggctttatagctgaaagactgcactattgtgggcttgaaaaaatagtgtaggagtgttgagtatttttcctgtggattataaatgtttgaaatctcccaaaatacggttttgcattacatatcatacagcaagttgtttatagctaaaaagaaaaggagcctcaattgtctttagaaatcaagcctaggttgtataattacattgagctcatacagaaatcattctcccatttgtatgctcatgcatacttcagattcaacttattcttttattcagttattatggaaaattatcattagaatcataaaggattgtgtttaaacaatgtagaaaagtacttttttgcatccctttcataattcagcatttatttcataaattgtaacattttagtcttgatttcttaaaaagcaaactcacctaagttatataatgttcagaaattactcaatttgaactgggtacccgaaccaacataattgttgaagcatttttaactttgttgcttatatgttttaaattagattttaaaatacctcattgagattttctaattgtaaatcctattatgacagtaccattaagcacaaaatatttgcaaatttataagagtaaatgccatttttgtccttttgcataccatttgttaggtcagagttttgatatgtgcgctaaaaatctgttataacatgatgaaacaaaatgattttggcaactgaccttgtcaaggaagatggaaagtctaactgttatacctcattagtgacacctgcttttttcttaaatactacattaaagcttaattcatcttccttaggtgttaaagatttaaacgtatcttgcatgattgggcctgtattgaatattagagtatgaatatcagacaatcccttttgtttctttttttttttttcagtttagcacagaaaaataactttataagcaaaaatttgaccccaggctagaattgcatttagcctttccaccaggcaatgagaatttatcagaagtgtgtttatttttattctcttagtggtaattattccgataaagaaatatccaattccagtctacaatggtctttgatggctccctctttgaatttggaagtagatatatagtaatatatgaagattcaaaccttgagataaatattctttcatttcatacaatatattattttaattggtcagaatgagactaaattatgattagctcctttctcttgttaaaatacagaattacagggttgttattttttttcctgaatcccacagcacctctatagcagacctccctctccacctaaggctgaaataaatatgctttttaaagataaggttagaattcatttaaaatatttctttatgtctgacactgttttggcattgtgggggatgtaaaaacaaaagaaaacaactattgcccttaagaattttgtaatgaaaatcgaagaacaaattaagactggctaaaaatgtgaaattttatggtactgtgttgacaacagtgcagctgttggtgggacagtgcatcatacagccagactttctagagggcagtttgaatattagtccaaaccttaaaagtgtgtacatgttaatatatttatgatataaatgtattatctatatgtcttttatatacaagtgggtaattaaatatcaaacagcagggattatagacataaaggattattatttatatttatattttattttattttgagacagtgtcttactccatcacccaggctggagcacagcagtgtgactatagctcactgcaccttcaatctcctgggttcaagtgatcctcccacctcagcctcttaagtagctgggactacagatgcacaccactgcacccagccaatttttaagttttttgtagagacagggtctcattatgtttcctaggctggtcacgaacttattgtaattattgaaaattgttttaaaatgtatgtataggaaaagaaataaatatacaaatttaaatagaaaagacagctttaaaatagtatgtaaaatatttattattatagagaagagggaaaagtcaggaaactcatgcaccaaaatattaaccatagttctcttttagaaatagagttattggtgatttaaatttttctttgaataatggtaatcattagtaattaatttttgatatgacttgtttaatgaattaaaaaaattaaaatcacttaaatgtattgagtgcttaccatatggcattgtggtaagcattttacatataacatttgcagtgtttccatgggttacaggttttgaggaagagatctttcccaaacaaaagaagtacacaaatatgcatgaacccactcactataatgttagattaagtttctgatttatttagtcaaggaaacgggaagctcctaggcattctcattgagaagaagtacttgcagccaccttagtgctctttccttggaccccagggttcccaaaggtggggtgcagctgctggtgacactgtctgatcatgtgggtcacaccagatctgcaaaactcagttcatgccatactattgtctttttatatttggggtttacattcatattctggatgagtttacacaactatctgtgcactttgtctgaagtctcatttccctgcaatctccaattttatacctacaacaattctgggaggtgagttttagtttttatagatgaggaaacagacccagaaagatgaacttaaatagtgaatactggagtcgagaaggcatgtctgatttctaagtctctgttcttaatcactagtctattttcctagagttttttggtttttttgtttttgctttttacagtgagcatgtattatttttgtattggaaaacaaaatcaatggggaaaaagtatgtgaaatgtagggtgatacagtacagtcatgtgtcacataatgacatttcagtcaacaacagactgcatatacaatagtggtactataagattataatatatttttactgtactttttctatgtttagatatgtttagatacaaaaatacttatcgttgtgttagaactgcctacaatattcagtccagcaacatgctatagaagttcgcagcctaggagcaataggctctaccataaagcctaggtgtgtagtagagtttaccctctaggtttgtgtaaacacacacaatgatttttgcacaaagattagatcacataacaacacatttctcagaatatatttgtgtcattaagtgaagcatgactgtaattcagagcaaggaaagatcaggatgggttggaataataaagacagcttaatacagcaaataaattttactgtaataattaacttttattctcagtttgtctgtcatttacacaagtatacactgcctctatcccaaacatgcctaaaccaaatctcggatgactggctggaagtaattaatgttctgttgttgtttcctgcagactaagttttggcctcatttttgtttcctttttgtggcccccttttatcttccttgcgccatctgtcagtgcctgtatgaacatgtaactataacttgtgtcaaagctcctcactacattgatgggcattataaataaaacaattccaataaaacaagtttccataaagtaataccctcgtaatttaaagactgagatggccaaaagaagttgtaaaatttacattaaagaattgaaatttccctagaatgttactatgcttgacattcaaactcatacacttatactgtattgaaaacttattgaaagaaagtagattcttatcaagcaaattaaacttacagcataaactaggactgatattcagccagtatgcattggcacagcagtacttgttaaaatactgaactgttttcatactagttggtaaatagtaaattgaagctgcaaaccacagtacaattagtgatacataataaagatggatgatttatcttagaaaccacacatgcacttagattccaatctggtctggtcactgaagcatggaactaggaagtttgctcaaacatcatattatttatttcagatgttggggaaagtgcagaagcccttggatgacagagagagactatgcagtgaactggagaggacctaatttgtgaaagtgtcagtcatgccaaagggaggagcagggtccaggcttaggtggttactgcagaggcttccacaagccgaggaaaaagaccctcagagtcattccctctggggtcggggagggggtgttgaggagcttttatttttttaacaactgaattagttttttatagcctcattacaaatttggtagtttaaaacaacacacaactattatttcacaatttctgtgaattaggaatctgcttacaccttagctgggatccctgtttcagggtctcctataaagctgcaattacagtatctgccagggccatggtctcatctgaaggctcaaattgggaagagttttcatccaagttcattcagatgatgtaagattcagttccttgcaggctaatggattgagggcctcaagttcttagttatgttagctggaggccaccctcagttctttgccacatgggcctttccatttgcttcttcaaaggaaacgtgaggagctggagagagtattagcctgagaaagagtgccagcaagacagaaatcacagtcttttatagcctaatcttggaaaaaacatcccataacttttaccttaatcacttcattagaaaccagccaactaggtttagtccatactcaaaaggaacagattacagaaaagagtgaataccaggaggatcattaggaaccattttaaaagccattgggaaccattaccctaacaacctatctcctgaagctaggagttaggaaaagagtccttcctgcatactatgaagagagctgtgatttagggtatatgcttagaaacctgattaatgtcagaatagagtgtgcttcagctagtgatagtatgagtccagtctcgacttcttcctacctttgcaaccattctccagataaaggagcctcacaccagcctgaacaatagatgctctaccccagtgcctgccccctcactaggtggggctcaccatgcctcagtgggagaggcctgcctggctctagcagcttcttcatcttcctcgttcttcctttcctccatgactcttgtcaaccattattcctatgcaactttaggaaatgttttacttcccattcttggtactaaaagcaaaacagcatttgtccaaaaggtaggaaatggcagtcagctttcttttcatcatttgatacttctctagtgagctgtgagtcaaatctcttctgtgtctatgatttgaggggaaagagaattaaaagcaaatcccaaaactttaatgagcattgtcaaatgaataaggagtgagattaaatattaagcaaacccaaattttattcagatcacccaaagtcaagttggtgtactttactatcaattttgtgttatttataaggaacagatgaaataattttgtcttttttcactttataaaccataattcttatgtattttggctattgtagagctacccacaaatgattacataatttatagcaatttattttaaaaatttaacccactgaatacaatgttgagatgagagcttttcaatgacagagaaagctcttgattttagtagagaaacaaattatcaatatttataattttctcatttcatttttagcatcttggccaaatgttttattaaaattaaactatttttaatgtatattttaaatctagaaggtatatacatatatacacacatatatacagttatgtgttgcttaatgacagatatattctgagaaatgcattgttaggcaattacataattgtgcaaacatcatagaatgtacttacacaaacatagatggtatagcctactacatatctaggctattgctcttaggctacaaacctcgatagcacattactgtaatgaataggcaattgtaacacaatggtatttgtgttatctaaacatagaaaaggcacagtaaaaatgttgcatgataattttatgggatgaccatagtatatatggtccattgttgaccaaaatgttattatgtgacacgtgactgtatgtcccaatactaatagcggttatctctcttggcagtggtttatgcttttcttaatttttccaagatttctataatgagttaatctattataatgagaccaaacacatgtcattaaaaagaaaataagtcaaaacaccactttctattcatagaagagtggcttttaaggtaagtagaacttcagtaaactgtactctctgaaatgtctcttctaatatggtatataccaacttttaaagctgagatttttatttagaaataactttctttcaaacaccttggctgttaatgaagaatattttttcctaatgagttttgcatttgtgggttttttcccctttgtgtttacactgaataaaaatttactcctaattctcagcttttagcttttatgagcgctagatggcactcttgctcaaccaaaatctagtttgttgcccatattttggtgctgtgggtcttaggagaagacgggtttgcaatgtcacaacacttatgtttttaaaggggggttggggaaaagagaccaaagtttccaagtttaaatagccgagcttaactgatttagtgtttccatctattgagaaaataaccatataataacaacgataacagtcattcatttcacaaatattttttgagcacctaccatctttagtactgttctaggtactcatatgcactaaagggaaaaatagataaaaatcactaccctcgtagagcttacattcaaatgcttggatttttttttgcaggtgccactttaaactctgtacatgcattcacccatttaataggaggctgagacacaaagaggttatctaatttgcccctgttcacctagctagtgcagatggcagagcaaggattcaaactcagacatttggtctccagagtttattttgttaatttcaatactatactgcctcttgaaactaaaaaaacaaacaaaaaaacactttattttttattctattgaatgcaaataataaaaatttacctatttataattttttctaaatctgcttaattcaaatatctttgccattttattaaaaaaaaaattgactagataaaatgtctgtattttttggtgattccgtagtcaactatcgtgttgccttagctctctttcaagtcacaaacacagctggccttaagtatttatttaagcatctttatattcctgtttactttaaactccttgaattagccatgcaataatttgggtatgttgtattaagagctctaccacattatggttcagtcattgtataattaaacatgaggcatcaagaatcaaaagttactgttttacttgcctgctctctccattgtgtcattttacattttagtagtactgtgttttgtttattaaaaaaagtaaaatcaacaatatactatgaagctgaaaaatgatacagaagcctaaatcatttcttagtctagagatgcatttcatggtttttagagggcagaaggaacaaatttacctttctctaaaaacatgcgacttggggaaattatatgtgacttagggaaattatgcttgtgtttctcaaggactggagttatattcaacaacatacttgttgtaaactactgactatagaagggaaatcacccactatacaataaaaatatttatggctaattcacacatagataacctatcattgaaacttgcctttcaggaagctgaaataattaattcttaacagctagctaggtcctttttcttttttgctgcagaactgtgttagaggataaagctgtatttttgaaatgctaataattaagagttaactgtgttttaattaaattaagtaattagtaaaagaggatcactcccttcaccagggagaagaaagttttcagagcagagatttattttggaagatgctacaatgtaagcattctcaaattgaggattattgctattttaggtgtctgaaccccttaagctgcatgcaaaactgtgtactcacttgcatttttcttgggagagagcccgtgttttatcagattttcaaagagattgtgatcttaaaagattaagaaccattgctaaaacgagagtgacctgctgcatgttaaacttattttccttaaactttagagaaaaattgaagtgattgaaactggggagttttaaaccaacaaagggaaatttttgttgactaaatgttagctcgtgcctctgagtctgctgagtgagtacaagacacattcttgcagtgtgtctggtgaatatttgtacttgagtttcttatgatgctggtcttaaactggcaggccctcacctggcagtttacaggttaaaagtttaagtctggcttccagaatatgaaaacacagggagctcagctgagcacagcagagttgcagccctcatgtaacatgaacaggaaatacatattaacacagaaattgatcctagactgccggggtccatatcccgattctgcctgtctaacctcgaggaagttacttaccatctctgagcttcagtttatcatcagcaaaatgaagataaaaggaccttcatctctttaaggtacttagcattgtgcctgtcttagaacttagtatggtaaaaaaaaaaaaaaagaaacaaaaactatctttgtatatgccttagttatctaaaatagcacctcttcttaccctctagatccttatcttgatttatttttcttctttgccccaaacacgacctgaactcgttatttacttatatatttattctgtctgccctagtaggttataagctccaggaagactgagactttttcttgttcattgctggaccctctagaccaatgctatcacatacattgtccaacaaatgtttgttgaatgaatgaataatgttagctattattattacttggcagtttctacccaccctctctcccatctgtgtggactgactgtagctttttctctttaaatgagatgggtaaaccaggaggaaaacgtccttccctacctgggtagctgaagtcatagcttcaaaaggaatattaatttcttatacgctcttactactcaaggtgtagcctatgggtcagcagcatcagtatcacttagggaagatattggaaatgcagaatctcaagcctcaccccagttctactggatcagacttgaatccccaaatggttctaatgaatgttatagtttgaaaaatgctatgttgaccactttaagaattttggattttatcttaacagtaatagagaaccactaaaatcctttaggttggagattacattttcagatttttgatttaaagtgattaacttgtattagaaacagtagttgtctttggaaaaagtagccattggctggggacaggaatgagtccaaggcttttcactgtatacgttttcataagcccatttcaactggtgggccctggcggtggcctgtctatgctgttctcccaccccaatcccacccacccctacactatgaaggatagacaccctgccctcacatcagctgctgcacaccccacatacagctgctgcctgtccactttctgagcctaaggttgcgtacatgggccttgtgttcagccatagggaggacaacccatgtgtaggcccagagagctggctcagcccatttgagtagagattcctacggttccaagtacctgaagcataatctgggtgggcacatgccctagtcctgtggacttcatctctcagaggggtgcagctggaggaggtccacagcaggccctctaaagtgtaggggccccactctctgggtctcagagacttaatgctcttttgcacttcctacattcaaatcacgtgaaagtattttgttcaatgtgaatctgttacctacatttaaaaaaataaaatggaacattaaaataaaatgatggttcttgtgtggggcatggataggtacaacaaaggaggcatgaagaccagttaaagggctgttgcattgtttcagcagtaggtgatgtaatgcttggattagcgtgataataagatgtggtttcatcacattttttaagtaattcattgctatgttttttaagtttcataagctcagtattaattttcttaagagtttgtggaggctgggtgcagtggctcacaactataatcccagcactttagaaggctgaggcaggaggatttcttgaggccaggagtttgagaccagcctgggaaacatagtgagaccccccctcccaccatctcaacaaaaaaataaaaagtaaaaattagctatgtgtcgtggtacacggctgtggtcctggctacttgggatgctgaggtgggaggatcacttgaacccaggagtcccaggtaacagtgagctatgattgtatcactgccctccagtctgggtggcagagcaagacccagtcttaaaaaaaaaaaattaaagtttgtgggaattaagttttctggcccatgaatatttgaagatgtttttacttttacctcagattttgttacagttgatttgaatattaggttaaaatcattttctctcataactgtgaaggcattattccattattttctagcatctggtgtttataatgagaagtcttatgccagtctcattcttattcttttagcatggaacttggtgtttttttttgtttgtttgttttattttacccctctctaggaggcttgtttttcttttttccgcaactttttttttaaacctatcaaatagttcaaaaaatagtatggaaaatgccatatacccttcacctagagtcacgtattgttaacattttgccacgatggccttctctgtttttttctctccttttgctcaacctcttgaaagttacaaacacttcaccccaaaatactttatcatgtttttcctaagaagaaggacattctgggaacttaagatgctttcatttatctttagagtttgaaatttcggctgggcgcggtggctcacacctgtaatcccagcactttgggaggccgaggcaggtggatcacctgaggtcaggagttccagaccagcctggccaacatgatgaaaccccatctctactaaaaatacaaaaaattagctaggcatggtggtaggtgcctgtaatcccagctacttgggaggcagaggcaggagaattgcttgaacccaggagacggaggttgcagtgagccaggatcgtaccactgcacttcagcctgggcaataagagtgaagctctgcctcaaaaaaaaaaaaaaaagcccaggaaatttcactggtgtatgtcagaatatgtttctccccactatgcttgggtcttttcaatataaagattgaatctcaaattactcttctatcctctcttttgttacttctcctctattatatctcttatgtctgtccttttttgaccaatagttaagtgttagaccttcatcttaaccttttttcatataccgtttcttttttgtctttttactttatatcttggagagttccctgaacttatcttccaaattacaaatttgcccttcagcccagttctattattcagttcttctattgacatgtttatttagcagccatgtttttaactttcaataactcttttgtattctcagattgttactttctctgagcagccagttcttatattatgagtattttattctctgatgatatcaattaaatttttaattagtttctttttctccctgctgaatcagccaggatcctagcagaaaatggatggcacactcagctggggtgactaaagagaaaaaggactgtctacaaaggtgtatgcagggttaagagaaaccaagaagggatgatgggcattttgaactagtgacatctggaagtcactgtcccccccaaacttcaggggcaaaggttgagtgtagttactggaactcagtgaggtctgcagctataagagaagcctgcctgcctaacaggaactgtggccttcaatagaggaatatacccacttctgccttcagaataaataccctgaccttcttctccctgtcctccaatttgttagtgcctctctatcataaaccaaacagtaagagtaccgtaatgatacagtccatagtggtgagcattttgaagcacaaaacagggtagagtagggcagatacatactttgcaggggcaaatagaacatatccagcatacctgtattgtgtctgtttcatgctatttaggaagacattttgatgagtggattgagactgtgaaaagaatagtacttggggctgatctggtaggataaggcagcagcaaaaataaattgctcttgtgaatagtcaaggtgagtgcagttgagagtcctgaggaagtgtgtataggatttgagtactcaaaactaagagatggaagaggaaagaccggagagagggagaggtaataacacaaagctatagccataggaatgaggctctgccgatgaaatggatccctttgaaaagcttacattccttttttgttttctttgaatttggaggacagttatcttacttagcgttcagttttagggaattttctctcctatttttactatcttttacctccaaaatgtccataaaagacttctacccttgatgactacacattaatgatgatctgtggagtgacagcagggtgggcactgtgcaggagggtgttatgggagctcagggaagttggtcatggtgtggaggacctgcagtgacagtgatacaatccctttgtgcccagatagactggagacctacagatagggaggggaagttgtgagtgaggaggcattggggttcaagctgttttgttgaacagtgagggctggaggatggtgggacatccagactataggctcttgaagttatatactcttttcctcttcagaaaagcaaccagattaaattgtattagaatgaaaggtgaaaagcatacattttcaaagtaggcctgtctgaggaaacataattgattttgcgaatattgcaccagaagaaccagggccaaggagataataagatgatggtggctttttgcctttttcctccagatctgagagtttctattgtattctggcatctgttacttcaacgtttgctgtactgtaagtcttcattgacacttgacccaggcaaatccatttttctctacatagtctctctcgaacttttaagcttagcactgtctttcactattgcagcatgtttctttttgggatggtcattatttcttctcttttaaaaataatatccatttatatctgttggttattcaagtggtatggctgtgtccaccatttgagttatcttcatgagcctcttttttctacttcgtatcacacatacttgaaaacagaagactattgttgacttgtttagtttcatcttatttttattaaaatttaaatgccatcacatgatctcagtgctatgatacatgtctggatcttggttacttgaattggtcgatatttcttaagggaaatagagtagacccacatataattcccacctactttctttttcattttatcccagagggatccacattccttccttaccctaattcactgcagggagacaaagagaaataataaccctcttcccctactgctccagtaaaaattacaacaaatcatagtgactttaaaaaaaaaaaaaaagaaacagcaaaccttcgtgatttaaaaataagcaagcttatgttttgcttcttcccctgtgaggaagctacagcaaaggctctagggaaagagtttggtagaaatcacaaatttgtgtatttttgttttagtttacagacatgttattaagccaaaaatcaagatacaggatctaacaaaggctttttattacctgtcaatatatgtattagttggaaataattaatttgaatgtagaaccaggaactattgtattcgtttaataattttacctttcactgagtatggatagtagtgattcttttatccctcttaaacttgcctcttttaagatttaagggatgatcttattcttagtttaggctcttatcttacattagacgaaaaggagttctaactttgtaaaataccttcaatgtattggttttagattctaattatagatagtatcttctattataatagagaaaaggtatagtaataatttcaatattttaaagtaatattaaagtaatttaatattttaaagaaaataatttttttgtattttaataaggggtcagtattttaagacaccaagaatattacaatcacatatgtcagaaagagaaatgtgtgatccagggtcttttctacacctgaacacacatttatcttattttttggcctgcaacctcgtccttattacaatggcccaatatcttgcttttctttgttttttcatcctctagtcatattgttacacatttgaggctatttaagaaagaaaaaggactctgcttcagagttttctccctatgtcttcatgatcaaatagaaaggaatgtgtgagagggacaatcaggtgatttttaaaaccaagtgaatttatattttagttatttcaatcacagtgaattgttacttcttttaatattggaaaaataaaaagaaacaaatctctgaaaattgaatgagtaaatgaaaacaggaaaagaagaaactaaataacaatagttattcttataaatctgagaagcatcataataatagtattaggggaaaataattttttttataaacctataagaacactgatagtgataatgattctcagacatgcctaaagttaaggaaaatatatgcttataaaggttatgataatagatgtgaaaatgggaaataataggaatagagaactgaaaagagttaatgggctattaaattcgggaacttaaggagagagggattggaaataagtgcaaaattttgcaactcaaatagcacagtttcttatgtgacaggtaacctatgttacatacttgatgaggaaaacaagaggacacagtactattcttgataacttttttaaattgtcacagtatgtaatatgaagacatttaggcaactagagggtgtagaaagtaaaacagaggactggttattgttgctgttgttgctgttttgcctctgttacatatgtagagattgctaaattgttactagtttatcaccacacagattttgccaacctgaaagtgtactctcagcgatatagacttgtttatacttcatatactctatgcttgctatccctccctccctccctcccttccttccttcatctctctccctctctctctctcccacccactctcggtctttccctttccctctcccccaccccacctctcctctcccctcccctcccctcccctcccctcccctcccctcccctcccctctcctctcctctcctctcccctcctctcttctcttctttcatttgatattttttatgtcccatgttttgatttggtgattgatgatgaactgtggctttcagatcttccttttgttctaaagcacatactgtcctaaatcattttctattttggtgttaattagtacatcattgggcagagtattgtctaggtagctgaatccatgatgctttggagctaaatacactattttccattatagcctgatatgtggactaggtcacctttagatttattgactctgagctaactctggagtcatctataaacctttatttatcatcttggcatataatcaggaacataagggtatagctgtttgaggatttgaatgatcatatggcctgtaggaaaaaaagggggcagtgggggaaattctagaagttgacagatatcaatcaagccagtttagtgacaaggctaaatactagtttactaagattctaagactatttcatgatgattttaccgttcattgttaatttccatgtcatgaatttcagttctttagatccaaaattgtatacatggctcaattttattttttctatttaatgcagcattgatatgggtaaagtaaaaggctacaagttggggtaaaataaatgaaaatctaattttttttttagtttttttttggcttttttcttttttttttaaaggataactattttcagacatttttgggtaccagacaacttgtagaaggtatttttcttcttttgaaatgtgttaacttcacaatatgtaatgaatagctttatatgtaaatggttaaaactcccctggtgacgaatttatagattgagtagaaagacaatcagattaaaagatggtagcacaagacgtatctgaatcaaagtatcatcaaaagcttaaaagcaaaaggatcagcaagggtacataggaaaatgcaaaggggaaacagcagtaatcacagcattaatctcagagaagacctcaggattcaaggattaggcaaaactcatcttctggcaagatagtgagttctcagttgggatgagcagacagttccccaactgtggttccctaaattttgattgctctgtctccatgaacatttccacatcatctctatcccctctggtcccatcactgtaattgagttgcctactgggtatggctcatggaaaatttggggcaagtcattggtctatgcagcctactggccttccccccaaccccctgcccaagggcaggcttcctctcttttctcgtgtgctccctcccaccaccccaccctcctacttatttctcttcaaacagttatacctgagcctatgttggcagtttccctctcctcttctatctaatatagaggtgtgtctctaccctggctgacagacatattcatgctcccctctcaggccagaagcctgcccgacctctacagggtgactcctgggactcagacagggcagtgaccaagggctgtttctctctgcaggaaggctctataacccattcgtttggtatactttcagacatctcgttctccctgagaccaactatgaagtgtgtttcaaactttgcagatgcagttgtatatttaccttcatacagcagtcccaccttatctatggtttcactttcctcactttcacttaccaacagtacagtataatgaggtattttgagagagagagagaccacattcacataatctttattatagtatattactataattattctattttattgttacttagtgtttttaatttcttactgggcctaatttctaaattaaactttatcatagctatgtatgtataagagaaaacatagtacatagggggttcagtactacctgtggtttcacacatttatgggggtcttggaatgtgtaccccacagataccaggggactactgtgtatgaattcatgttttaatacagctatttctgtgtctctctctttcacacgcacacaccatcttaaaatttttatatatgacttctcatagtgttttcgttaaagataaatgtttttacatggcctcacataatttatcatccaaactgggacactgtgagagaagggattacaccaagtcaacaggagtaagccaaattgaatagtcagcctccctgcaaggccctccatggtgtggctgctgaccttggcagcctcatcttgcaatgtgctcttcctcgctctgtgcgcctcagactcacaggccctctttgcttactgcttacttttgctcaaaagcctttgacatgctttctcctctacctggacagagctttgcctctgctctcttattcacctaataaactccccttgttcatttttcggatttctctcaattctgacttcctcaagaatgccttccaggctgggcatggtggctcatgcctgtagtcccagctacctgggaggctgaggcaggaggatggcttgagactaggagttcaaggctgcagtgagccgtgactgtaccactgcactccaatctgggtgacagagtaagaccctgtctcttaaaaagaaagccttctagggcttccctaacttgatccattctctctcattattcctcagagcaccatcttttatcacgtttagataattcttggattaatttctgtcctccactaaagtgaggtttaatgtgggtagagaccatatcagggttttctcatcatttattttttcatcactcattaggcacatagtaaaaactaaataaatatttgttagattaattaattttttttttgagacaggatctcgctctgttgcccaggctggagtgcagtggtgcgctctcagttcactgcaacctctgcctcctgggctcaagccatcttcccacctcagcctcctgaggagctaagactacaggtgtgtgctaccatgcctggctaatttttgtatttttagtagagacagggtttcaccatgttgcccaggctggtcgcgaactcctgacctcaagcagtccacccacttccatctcccagagtgctgggataacaggtatgagccacctcacccagcaggttaattaatttaaaagaggaagatgaagatcaagtttattgcatatcccaaaatatttaggtagaattaattctgatacatcccctttaatttttgtttaaaatacatggtacatttttaaattataactgaaagtgttcaaaatttaaaatttttattttacatgttatacacaaatagaaaatttctaaacattaaatttgttgaaaaaaattttttggtcaaggctgtttttttcttagatcgcatgcctgtctattatttaggtttaatacatggaatcagatgtggtttcacagatatgtatattagtacattgttcttttttcctaagggaaatataaaattaagagtaacttattgttgctttaattttagattatgtacattttaaagtcagatatacaactgagttatgaataatatgtgtgagatatttcaaaaagtaaaatgcatttttaaagaaattgttacctttctgagtagcaatttaatcataaattaaatcagggttcatatacatgtattgatttaaccatttaaatgtatttgatttgaaattggtctgtcctgatgcaaggattcagaggggagaatagaaagagcagtggatacttttcctggagacattgaaagttgcctggcataaatttaacacagagagaaggaagattatgtcattattcctgattcccttggtcattcgtcttgtggagaacaattgctacattccagtaacaagttttctgaggcttactaatagctccatgacatattaagtactgatctcatttaattataatttcagtgagattaaattattctatgtagttaaagtagaatcgagcatcctacagatgctgcactaattatagttattgatggcctactttttctgacctaaaaaggtaaatgagggagggaattgtctttgcctttgaggaattttccctctaaaatagattagttcactgtcattgctgtttattttcacctaacacttttctagaatcttcataaaactgcacagtactgaactaatcaatagaaaaggcagatgaatattctcccaaaggaaaaaaggcttggcaggtcaaatcaagcatgtcagatctctcttgccactcccaattagaaattgtaaagttttataaacaggtgctttaagcaaaagatgggatctgtggatcaggaatacatacacaagacactaattttaaaagctattacatttcttaaaatacttatctaaaaattctccttttaaattttttagaatctattctagaaaaaaaactcaacaaattatcctttgttaatgttttatttagtggtgtggctttttccacagattagattgtttactccttaatataaatgtgtgtgtgtgtgtgtgtacgtgtgtgtacacatgtgtttgtcttttttgttgtttgttattgtttattaatgtgtgattaacagaggcctagctttggtgctttcaggctgagaactaaagggatgatttgtagaaaactaaagtaggtcaaagaataccatggtgtagcaaaggggaagtccctgtgtttagtcacattgttttgcctctggtggagttcactttcattgttatagtctaggcctgtcttcctgtgagtggaagaaatcgtcaaattgcagaaaagtctcgggaatattatcataagtaactttttaaaacaatatgttattgtaagttattggaagggccggtaggggcagcaaaggaaaaataaaaagtagaactgaatttatccctaaattaatttcacagatcaaaagcaaaaatatgcatgaatatgacaccttctctaagtatgatgtaaggagtactgtgtgggtctctgtgggatgggaactagcatttcaaattttgcccgccttgtgcttgcttcagcagcacatatgccaaagttggaatgatacagagaaaattagcatgcccctgcacaagaatgacatgcaaatttgtaaagcgttccatattttaaaaataaaaatacaaacaaaattttgccctcttattctgcttttttatatatagccattatggaagtgaccatgtttcgaaatcaaggagctgttccaggctttagcaatccatgtcatgttagttctgaaaatatgcaactgaataaacattaaaagcacacctactgatcgttgcagtagcaactatcacacttttatgaaacaccattttgtgtctgcttggctatgattaagcagtactattagaatccaggaatgtactctggctagcttcaaagatcttagactgttttttacatctcaaagttaaaatgaatttctcttaaaattaaattttaagaaatagcttcctcaggttggttaaatgttaagaagttatctgtaaattatgtgtgtgtgtgtgtgtgtgtatgaagtgatatatatggagttacataaattttgaaaaacttcgttttaaatttggtgtttcctcaaatatagtatacttgatattttggattatgttttctcttacagcagaaggtttattctctgactaaatttcctttctttaggtacccccctacccacccaccctttataagggcaagacacctatgagaatattaagccttttagctcagagttttactgaagttattttctattcttgtatttgccaagaattgctgacaacttaaaaaactatcatacgagtgaaaaccagttgcctagattgtttgatgattttggtcaagtgtggatcgggatttcctgtcatttttcttcctcttctggggctgcattgcttctatctctcagcaattgtacacttggaaagaaaaaacaaaagaaggtcactagatctgaattacttttacttctgtgccaaatgaaactttccttctgttacgtgttacaatgtttggcatcttttggcatctagagagagataagcagttaggaggacaatgtgggatctgtacagtcacgcatcacctaatgatggacatatgttctgagaaatgtcatcaggcaattttgtccttgggcaaacatcacagagtgtacttacacaaacctagatggtatagcctactgcacacgtaggctatatggtataacctagtgttcctaggctacaaacctgtatagcatgttactatactgagtacacactggcagttgtaacacaatggtaattatttgtatatctaaatatatctaagcctgggcaacatggtaaaaccccatctctacaaaaatacaaaaattagtcctgtgtggtggtgtgtgcctgtaggtccagctacttgggaggctgaggtgggaggatcacttgaactcaggaggtcaaggctgcggtgagccgtgatcgtaccactccactccagcctaggcaacagagcgaggccctgcctcaaaaagttaattaattaattaattaatatatctaaacataggaaaggtatagtaaaaaaaaaaaagttactgtacaatattaggggaccctgttgtatatgcagtacatcattgactgaaacatcattatgtgttacatgattgaacctcatctagagacagccagttccttctcttgggctgaaacatgttcctggaattcatatgataaagcaggttatcatcaagagaaactcattttcctatggattatatgatccagcagcttagaatacatttctgaattctttgtgttttggggtgtagctgaatgaagtttttagtatgtcaaagggagacatgttttaagaagtaggcattctactgaaagtattgtaattgcttgctgaatgaaggggataatccttgccactgcctttaaatactaggagttcctgcaggacagcctgaatattttttctggatcattaaatgaacaactgggttccagaagataagagaagtatgaacttctgagcagaggtagatccttgaataagaggaacctttctttagaaacagtaattgaattttgggaattgttgagtatgtcagtctggaatgtgtttggctgcaaataacaaaaaaaccctactatgtagtataaacagataggggtctgcctccacaagaagtcttaattaggcagtccagagccggtgtgatgttcaactacattaataaaagccctctgccatccttagaatgtgatttgtatcaaggttgtaaaaagtctgttgtaccttcacgtatcaatcactatatttctggcatctattgttgtgtaacaaaattaccctaaaacatatcagattaaaacaataaatattaattatctcacatagtttctgagggttgaaaattcaggaatggcttagctgggaggttctggctcagggtcccttatgaggttgcagtcaagataccagctggagctgcagtcctctgaaggcttgtttgagctggagatctcctttctaaactaactcacatgactgtcagcaggagaattcagttccttaccatagggatctctctacagggttcaaggcatggcagtggacttctctcagagcaaatgatctgggagagtggggagggtctagagtgtgtgtgtcaggggagggagaggacagatggagataagaacaagatggaagttgcaatgtcttttataacctaatcttggaagtgagctatcactcctgccatattctgtggtcacagaaccctgatacagtatgggaagggactatacaggatgtagtcccttcaggagggaggcatcactgggagccatcttgtaagctgcctcctacacatcacaaatatgtactacacagtgagaaggaaaggaaagagacagtgctagcagacttctgtttgtatctcattggtgataactgtgtaacatagcttctcaagggaggctgggaagtcaaatgtttaactttcatagcctctgtagtagagacaggcagaaggaagttggaaatggaacttgggttagcctactgtccattttctgccactaccagggcatttgatgacagtgactacttttaatttgcctgtattgcctgttcgtagagttaatgatgcatcttctaggagattaggagtagcccagaaaattgctttttgttgttgttgtttttccaagacaaagtcttgctctgtcacccaggctggagtgcagtggcacgattatggctcacagcagcctcaacctcctaggcacaggttatcctcctgtctcagcctcccaagtagctgggaaaggtgtacgctaccatgcctcgctaatttttaaattatttgtaaagatgaggtctccctatgttgccaaggctggtctcaaactcctgggcttaagcaatcttcctgccttggcctcccaaagtgtagggattacaggcatgagtcactgcacccagtgaaaattactcttttaaaagtgtggtggtttctctagttgttttagaaataaagttctcactggcacctagctagctaacagaaatagcttaaattgtgaatcataagtagtttgttgtgaggaaattttaggttactttctcctttgtattcttctacatttgtttgcataaaatatttaggcagtaaaaattctgaaatctaaaactatacccaatgccagttttcagatccaaaaagaaaaattcttcccaaccacaaacatattgagtaactactatatatcacggacaatgagtacagatcttacacaatttttggaaatttaaaaataatctctgttaggcactattttacttagtgataattttatttgtaatggttactagacttttgtgaaccatattgttgattgaaataaccattctggttttctttctttctttttttttttttttttttttgaggtggagtctcgctctgttgcccaggctggagtgcagtggcatgatctacactcactgcaacctccgcctcccaggttcaagcagttctctgcctcagcctcccgagtagctgggattacaggtgcctgccaccacacccggctaattttttggtatttttagtagagacagggtttcaccatcttggccgggctgatcttgaactcctggcctcgtgatccacccacctcagcccctcaaagggctgggattacaggcatgagccactgcacccagccaccattctgtttattatatattctttcattaattaataccaaactacatttctgaaaaataccacacaacttgaaaacaagaaagtagagtctgaaaaactagggacccaagaaggattggagaggaaagtgaagggagttagatgcaaaaaataaattgaacggagataaggaccagggttatcctaccctccctttcctcttttcacccagggaccaggttaaaagaggattctgtcttcaggaaggagaagcacacagctattagcaggtagaggtgaggattagaaccttgtgtgagcagatgtcatgcctcaaaaatgtatccatatgttttggacaaaaggctggttccataaatatactggaacaactgttcaccttcttggagaaaagtataaaatttggacctacctcatactaacaaatagagctgctatttaatttgaccttaagttagggaagatcttttaaagcgtaaaagcaagggaagaaagctttaatggaaaagatagttttgattgcataaaaattaagtacatcaaaaagtaccttaaatttaaaatataaaccacaagttggaaaaatgagttgtatcatatatgaaaaagttaatattcttaatgtgcaaagaagctcataaaatcataagaaaaagcaaaagacaaaaatagaaaaatggatgtggtaaataaaaattttgaacaagtgtgccaaaaagctcaactttacaatgacagaagaaattttttgagagactattattttttttgtgcctactatcttagtagattgtccttcaggagataatcctcgtgtaggtcaggatgttataaaatgagctttcttatacactgcttatagacatgtaaattggtgtaacataattttatctttttatcagtaattccacttagggcaaaaataatatttcttcacaatagagctctaaaggaattctttactgtattttttaaggattataaaaaatcgagtataaaaatattttttcacctttagactgtatcattctcttctgttaaactgagaaaattaatgaacttgttttttccttcctcttacctcgtatttttgttagtcaagttattattttaatattcttaagatctatgacatttaagttctattccatcatcataactttcagagttagtcttagtttctatatttaagtaaatttgtttttcatcattggtatgaataatcggcagaaaattaaattgacaattacttagatgtatgttcagggaatttttcccagatccctccccccccaaaaaattaagaaaaaacgaaaagaaatgtcttgccaacaatattaaaaatattaaaaaattgacaagggaaaaactggggcaagaagtaattccaaaataaagatgaaaactactaaaattgcacaaagtaaaggtaattgcccagacccagaaggcaaacccaagcctctgttaaatttgtctacatttggtttatcttaaagggtattcaaaagctaccacttttaaaattcctgaagtatgcatacttattaatacagatatgataggtcctagaaaatattttcaaaactgagcgagtgttcgtccttctagttcttgtttcatgagatccaacctttatgaattttctttcccttaagtgtttgaatttcagataaaagcagtgaaagcgtctaatgccttctcattgcatttaggaatgccagagtccttcatgtggcccatgagggctttcactggcccagcctcatctcccagtctcatctccatatttcccattactttctgtgtccttacttagttcactggctttgttactgctgttgttcccactttaatttatagcagcctctcctgtcttggggctttctcatgtttctcagtctgcatggaatgttctctcttcccctcccccacaccatgctttattaacaccagcttatcctttatatcttagtataattgtcagttatgcagggaagtgggatatgtggcatatgacttaagcgctctgttgtcttattgtttgggttttcatcccagttcattatttactggctgtataatcttaagttatttgacttatctctgagccccaatttctttatctgtaaggtgaaggaagataattcttactcataagatgctgtgattatcaaataagaaaatgagagaagccatatgtttccaacacaaggcttcactagcattgaatgaagtacttcttaaatgttagacaaaattattcccaacctacctcctacccccaattccctgctgtgcacacacgcacgcacacacacacacacacacatcctagtcttgaacagctccttttattgaatagtgacgtatatgaccatatacctcttattcctaacatttacaactttcaattactttattgattgtttgattaatgtctgtctcccttgactagattataagctctacggggtagcagctgtgtagttttgctcatcctattctcagtacttagtctggattaagtcaacaataaatatttgtcgagtgtagggacaaatgaatgaactaaaggaatattctgtctcgtctcaaaactgcatacttaatggttgaaatgtttcctgtagtatagttttgcctttaagcctataaatcacaaattcaatatcaatgactagagaataatctactgccagtaacttatataaaacctgcttgtcaataaaaattgttttcaggccttttggaatgtttaaatataacatttaaaaagtacataatgaatactctcattttcaataacattgggaaaggattatattaaaactttaagtgaacattgaagtctagataaactattttaagtaatgtttgatctcagctgtctaaaaatatacataagaaagagaactgaaagtaaatataccagtgtgttataatagcagtggctttctttgagtggtaggattatgatcaattttaatcattttgtgtctatgcttatatatttatatcaatatagtcttcacttttacagtaaaacattgctttataataacaaaaattatctttaaaattttctcaaatatttctggaatttatagagggaaacttcattcatttatctaacaattatttactgagcaactacaaagtgccaggcactgttttaggctaagaggatgagattataataaaataagcaacaattcctttctttgttgaattttcattttgatgtatttgcagctacctgtctgactttggtttgaaacttatcttctacatctgtcttattaaaagtaatggcaaaaacctcaattacttttgcaccaagctaataagccattgttgtctgctgtggtttgaatgtgtcactccaaaatttgggtgctgtcaatgtgatagtattaagaggtggggtctttaaaaggtgattaggccagagggctgctccttcatcagtggaattaaggtccttataaaagaggcttcacacagggtttggctaacttgcctttgttcgactgtcttctgtcatgtaaggagatagcaagaaggcccttatcagaccaaatgccagcatcttgaccctggactttccagcctccagaactgtgagagaaaacaaaacaaaacaaaagattttttaaataaattacccagtctcaggtattctgttacagtggcacaaaatggagtaagacaatgtcacattaatgatttatcatttttatcttgtattcaattacagaaaaaaagaaaaccagtgaccacaatttctaaactctttgtaattctacaagcttttaagtgtttttcatactttagaaccccatctttgacctctaatggtaagcaaaaaggtaataagaggaccctatttaaacattccttaaagggttacattttctccttcaaagagtccattcatatagtattactcactaatatacaatgttgcagtttgttcaactccttttatgttaaaaatacacaactgatgtgttacatttttcactgaagtagcaccattattgtctgactcagtttcaatgtttggtaaataatttttaaaaatctttataatattctgatcctctgaaatttcattgcaccctgctgttttataaaaccaattttaaagctactgatccaaaagaagttttaaaccatcatgaaactgatttctgaaatgagtttttttttgttgtttttttttgtttttaagagatttcctgtttgcttctgaagttagtttgcaaattagttgtttaggactcaggttatatttctgtgtctaagcagcattaatatttggtgattagcttcaggaatcagttcaaaaaaggtattcagcccttcttacttgaagtcatgctaattgaacaactttaaccataacaaacgtccactcataatattatttctatggaggtggctgaggaccacattccccctacctaagcagtagaagctgtgtttgttccttcttgccttcctttgctaggctggaacctggagaccagaaagtaagaatggaaaggaagggatgctagtggtggatgagtgattgttggcagcagtatttttttaattccttatgattactaaaagaagatagctctcttggaaggttggtcttcctgtggtcagactggaaatcagcttttgcctttaggctgagagacctaaggattatgtaagtctattgatttaggaatgggagggaacttctgctgcctgcccatttgtatagataggttatttgaaagttagagactgctttgatgtttgcctgcctctcttaggaagctaatttcatcagtctttcagaccagtccaactaatttttcctccttcaatcagttttatatatttaaagtctatttttaatatttaaagacttgccatactgtctcctttgcaagatggaaagtctatgattcactgtacattaaaatgactttttttttttttttttaacaatttaaacaatagcattctgtgtgtcttttctaggctggagatgtgttctctgcttctagccgctgaatgttttgactgctacttaatggcgctgttgcagacagatgccaccttcagctggtagcacaattggtcagtctttgaacagctctgagttgggccagttattgctgtttggacatgtttagatttgaagttcctcccttccattgtgagtagagcaagattgtgtcatcccataaaacctgttgaaaagtgaaaaagtagtcaaatcagatgcctatccaccagtttggctttttcactaaattggccagtattttacttcatatacagagttttaaaaatcagttgttattcctttacttacagcctttcctttgttgtattttacaacactgttttataaatcttcattttaaaatttcttttaaagctgttgcctatgtttcaaaccaaagtcagacatggagatgtatttacttcctcttctctgggtatttatttgttttgacatttaattcccatgatgcaactttcttgagaattttttaaagagggtattttggtaagttaacttcctttcagttctatgctattaaaaaatacatataaatatatatgtaatgatttcaacataatatatattatacatcaatattagtatataatatattaatataaatatacgtcccctctcctttttattttttattttttaactgacacataataattgtacataattatggggtacataatagtgtttcaattacaatgtgcagtgatcagatcaggataattagcaaatccgtcatctaaacagttatttctttgtgttgaaaacattcaatttcctctcttctagctgtttgaaaatatataatattgttaactatagttatcctacattgctatggaacactagaacttattctgcttatctagctataattttgtatactttagcagatctcttcatattcccccctttccccctactcttcccagcttttagtaacctctcttctaccttttacttccatgagatcaactttttttttttggctttcacatatgagtgagaacatacgatgtttaactttctgttcctggcttattttacttatcataaattcagttccatccatgttgctgtaaatgacaggattccttcttttttatggctgagtagtattccattgtgtgtatataacacattttaaaaatccattcatcctcttttttttgataccaacttttcctacttttatgtgccaagatgttctcaaagccttgcagaaatcatagctgtcatttattcatacacatgttctacaggtgtttgttgaaagctagctctgtacaaagaagcgtgctaagcaaaaaggacaaagacactaagtcctagagagacttgctgtttagtggaggaaacagagaaggaaaccattgttatgttttaagtactcatcccgtcactttttatagctctgaacttcacacattggagtaggattacagcctgtgatatatggccatatcccagggtatgcaggaacacatagaataaattgtgatgtatcttcctggaatttagaatcaggggaatgggaggcagggatgaggaagagataggtaatttaactggtaagtaatgaacagcattattttaggttaaaaataagcatagctgtattagggaataagattttaaaatttgacataaaaaaaattctcctacttgtggccatctacccacaggcttgtcaccatattatcccctgtggaaggagttcactcctctcagaggttagaggtcctctgggaaagattttgtaaaggcccttctatctgttctaataaacctggttgtgttaaacagagaggctagagaaggtggctgccttttcagagcacagccttggtatttcctatgcagtcactaccttttaacagtaatcctttaaaaatactttcactacttttgttaactaaacccacggtgcaatactgtggtgcagatctcaagacaagtaaacaagggaggtggaggaatgaatgtctcaggaaggtggctcctcaaactattcacctgtggttaaactgcctgcaccacatacaagcagggtcagttggagatatctgaatgtttattgaggcctttgtgatcttggaagacaaaagattaagggagggcatttgtgaaggtcattcttcttgtcactgtttcagtgaatgttgacagcaaaaatattgcattagatttttttttttttaatttatttttttattgataattcttgggtgtttctcacagagggggatttggcagggtcatgggacaatagtggagggaaggtcagcagataaacaagtgaacaaaggtctctggttttcctaggcagaggaccctgtggccttccgcagtgtttgtgtccctgggtacttgagattagggagtggtgatgactcttaaccagcatgctgccttcaagcatctgtttaacaaagcacatcttgcaccacccttaatccatttaaccctgagtggacacagcacatgtttcagagagcacagggttgggggtaaggtcacagatcaacaggatcccaaggcagaagaatttttcttagtgcagaacaaaatgaaaagtctcccatgtctacttctttctacacagacacggcaaccatccgatttctcaatcttttccccacctttcccccctttctattccacaaagccgccattgtcatcctggcccgttctcaatgagctgttgggcacacctcccagacggggtggtggccgggcagaggggctcctcacttcccagtaggggcggccgggcagaggcgcccctcacctcccggacggggcggctggccgggcagggggctgacccccccacctccctcccggatggggcggctggccgggcagaggggctcctcacttcccagtaggggcggccgggcagaggcgcccctcacctcccggacggggcggctggccgggcagggggctgacccccccacctccctcccggacggggcggctggccgggcagaggggctcctcacttcccagtaggggcggccgggcagaggcgcccctcacctcccagacggggcggctggccgggcggagggctgacccccccacctccctcccggacggggcggctggccgggcggggggctgacccccccacctccctcccggaccgggcggctggccgggcagaggggctcctcacttcccagtaggggcggccgggcagaggcgcccctcacctcccagatggggcggctggccgggtggagggctgaccccccacctccctcccggatggggcggctggccgggcagggggctgaccccccccacctccctcccggacggggtggctgccgggtggagacgctcctcacttcccagatggggtggctgccgggcggagaggctcctcacttctcagacggggcagctgccggacggaggggctcctcacttctcatacggggtggttgccaggcagagggtctcctcacttctcagacagggcggccgggcagagacgctcctcacctcccagacggggtctcggccgggcagaggcactcctcacaacccagatggggcggcggggcagaggcgctccccacatctcagacgatgggcggccgggcagagacgctcctcacttcctagatgtgatggcggctgggaagaggcgctcctcacttcctagatgggatggcggccgggcgcagacgctcctcactttccagactgggcagccaggcagaggggctcctcacatcccagacgatgggtggccaggcagagacactcctcacttcccagacggggtggcggccgggcagaggctgcaatctcggcactttgggaggccaaggcaggcggctgggaggtgtaggttgtagtgagccgagatcatgccactgcactccagcctgggcaccattgagcactgagtgaacgagactccgtctgcaatcccggcacctcgggaggccaaggctggcggatcactcgcggttaggggctggagaccggcccggccaacacagcgaaaccccgtctccaccaaaaccagtcaggcgtggcggcgcgtgcctgcaatcgcaggcactcggcaggctgaggcaggagaatcaggcagggaggttgcagtgagccgagatggcagcagtacagtccagcttcggctccgcatgagagggagaccgtggggagagggagagggagagggctagagctacattatcttattgcattagatttttttaagcttgtaaatataatattttttacttatgttccaaagtatatgaattattgaaagttgaggcattggtttttcatttagagcaaaagacagaatacgcttttttcagcccatatgggttcaaaatcaaattcttattttcaatcagagttcttccatatcgtgcctcacatttatttatttcagaaacatgtattatctactctgtgtaacattccatgccagacactggagaaacagataaggcaaaggtctcattctcaaggagctcacagacaggtgggcaagataaacaggcagttatggtatatactagtaagtgccatgcaagagaattctgcaaaggctttggatggttggggatgaggggatacagaaagggagtagccagggtaagcgctgtagaagagtaatgcctcagctggctcttgaagcctgactaaggagaggccagttgaagaagtgagagataaggtgctctggtcagagagattagcatgtgcaaaagtacagaaccatgagatttactgtgtttgaagaactgtaagtaagttgaactcagtatcattggagacataggcagagatgcaatctgaaatggaattatatgccatgtgaagaatctggattttattttgaaagttagggggaacctataaaggattatatcatcatcagatctgcattttggaaagacttctccagtgtagagaataggctagaaggtggcaaaggcattgagacagaaaggaggctatcgttctaatctgggagagacatggtgagggactgttttgatggggttgggagtgaggttgaggataggggatagattttacagtttctaggatgtagaatattcagaacttgacaagaggttagtaagggtgtcagaggagcctagctaggcacagacttgcaggtgtctgcactggacaactggaggtataatgaaggccttcgtggagatagggaatataagaggtggtagcgtagtgcaatgggtttggggaaggtgatgagttcagcttttttttttttgaaatggagtctcgctcttgttgcccaggatggagtgcagtggcgcaatctcagctcaccgcaacctctacctcctgggttcaaccgattctcttgcctcagctgcccaagtagctgagattacaggcatgcgccaccacgctcagctaattttgtatttttagtagagatggggtttcttcatgttggtcaggctggtctcaaactcctgacctcaggtgatctgccctcctcgacctcccaaagtgctgggattacaggcgtgagccactgcgcccggctgagttcagctttttattttttattttttgattcgagatgtctgtgtgacatcaagattaaatatattaggtagatagagaaataggcctcagattcaggagaaaggactgagatgtaattacaggtttggtcagtgatgaaagcgtgagatcattcagggtgatctagatgtagatattctcttatgttttcttctagatgttttttagtcttatatattaaatttaggtctgtgatccattttgagttactttttgttaagggtatgaggtttatgtctagaatcattttgttttctttcttttctttgcgtatggatgtcctattatttcatcattacttggtggaaagactatcctttcttcctttctccattgaattgcctgtactccttttttttttttttttttttttttttttttttttttttgaggcaagttctcactgtgtcatctaggctggagtgtggtggtgtgatcacggctcactgccctggtatccttggctcagacagccctcctgtcttagcctcccaagtagctgggatcaccggcaggtgccactatgcctggataattttttttttatttgtagtagtggagtctccctgtgttgcttcggctggtcttgaactcctgggctcaagcaatcctcttgccttggcctcccaaagtgctgggattacaggtgtgagccaccatacctggccacttctttgttaacaataagttgaccatatttttatcagtctatttctgggctctctattctgttccattgatatgtgtatctgtcctttcaccaatatcatgctgtattaattatgatagctttataataagtcatgaaaacagttagtatgactgttctaggtcttttgcctttccatataaaattttgaatcagtttgttgacatttacaaaatagcttgccaagattatatttggaatgttgaacttacagatgggaaaaatggacaccttactagtattgagtcttccaatctatgagcattgaatatttctccacttatttggatttttgatttctttgatcagagttttgtagtttttggtgtatagagtctatacatattttgttggatttatgcctattttcttttttattgtaattcttttaatttcaaattccagttgttcactgatggtctatagaaaagcaattcactcttgtatattaactttgtatcctgcaacctgctcaactcccttattagttctaggaattcgttgttttttataaattccttgggattttctatgtacataattgtgtcatctataagtagggacagttgttatttattccgtttgttgtttttgttgttgttgttgttttttatctgtatggcttttatttacttttcttgccttattgccctgactagaacttccaggactatgttgtgtaagagtggtgagagtaaatattctttccttcttcccaatcttaagaggaaagcattccatctttcaccgttaagtataaaaacagctgtaggtttttgtagaagtttttaagctgaggtaactcccactctgttcttatttttctgaaagtttttaaaaatcataaatgagtgttaaatttactcaaatgtttttctgcatcaattaatatgaacatatggtttttcttccttagcctgttaaaatggtagattgcattgattttcagatgttgaaccagccatgcattcctggaataaatccccctaaatcttgatatataatgctttttatacattgtggaattctgtttgctaatattttgtttaggatttttgcctccattttcatgaggctgtatttttctttttttgtattgtctttgtctggttttggtattaggttaatactagcttcataaaaataattgaaaatttttccctccttgttttctggaaaatattatgtaaaattggagttaattctttaaatgtttggtggagttatccagtgaaataaactggatttggaaatttattttgggggagtttttaaaaatcacaaattcaattttcttaatagcaatagggctattcaggtgatctatttcatagtaggtgagttatggagttatggtgggaattgacccattttgtctaacttgtcaaatgtatgagtatagaatgttcacagtattccattattatcttttggtctttgcaggtttgttttttttttttcgcaataatcctctgtttcattcctaatagatattggtaatttatgtcttctcttaattcccgtgtcagtcttgctagaggtttttcaatttttttttcttttcaaagaaccagcagtttgtttcactgattttcttttactcttttgtttttctgttttcaaattcattgatgtttgttctttattattttcttctgtctgcttgattctcagtttatactgctcttctttccctaggctcttgacatagaattttagatcatttatttgaattttttattttttaatgtatatatgtagtgttataaatttccctctcagcactgcttcagctgtgtcccacaaattttgatatgttgtattttcattttcatcctattcaatatattttttaaatctccccgatacctcctctttcactcatgaattatttctgagtgtggtgtttagtttgcaaatgtgtccaggcttccattttcctattatctttctattatttacttctagtgtgatttcgttatgatcagagaacacatactttgcatgattttcattcttttaaatatattcaaatttattttatggccatgatgtattctgttttggtatatattccctgagcatgctaaaaggctatgtattttcttattaggtagagtattttataaatgttgattacatcctgttggtttataatattgttgagttcctctacatttttgctgattttctgtctagttgttctagcaattgttgagagaggaatgttgaagtctcctgctataattatggatttgtttatttctcctttccgtactaccaggttttccttcatatattttacagctctgtttggtggatgtacatttgggtattgctatatattcttggtgggtttaactttttatcatgatatataatgtccctccttgtctctggtaattttctttgctctgaagtctactttatttggtattaatataaaaattcctgctttttcaaaaaatgtagtaaaacaacaattatggtaaataacttctaccgctttttcattgtcctcaaaatccctcctttggcttaatagttacttgttagtggcgtaagtacttgtacaagtatgtttggtagatttactgagttgttggagatgagaaatagcaaaaggtcatctgctatttttatgttgcaattttattttatttttttaaattattatttatttagtttttgagacagagtctcactctgccacccagactggcacaatcacaactcactgcagccttaaccttctgtgttcaaacaatcctcctgcctaagccccccaagtagctgggactataggtgcatgccacaatgcctggctagttttggtttgttttttttttttttaatagaaacagggtcccactatgttgcccaggctgatctcaaactcctgggctcatgctaatctccttcctcagcttcccaaagtgctgggattatgggcatgagccactgtgcctggcctgcaatttgaaatgatgcacactctgtaaattgagggtatgttattttaaaaatttatgctagtttgggccaggtgcggtggctcacgcctgtaatcccagcactttgggaggctgaggcgggcagatcacgaggtcaggagattgagaccatcctggctaacacggtgaaaccccgtctctactaaaaatacaaaaaattagctgggcgtggtcgcgtgcacctgtagttccagctactcaggaggctgaggcgggagaatcgcttgaacccaggaggcagagcttgcagtgagatgagattgcgccactgcactccagcctgggcgacagagcgagactgtctcaaaaaaaaaaaaaaagattatgctagtttgtcacatatatgtttaacagttcatttgttttcaagaagttaaattcagggaagcgacaccaagaattcctgttttaatttaatcattgtagtgggacacctgatgtaatttgctggcgttaccctaagagtccttggacaagtatgtacacaaggaatgagaatggcacaactaaaatgataaattcttagtaactttcccacatttaacaactaaattgacagagaaatcagaagtccaaaacaataaatgaaaccttttaatccttcttcaaccccagtaatttattattactccccctaaaaaatcctcagtcgtaatacttttctgcataatttgttcaaaaaggtgtatttaaatataataaaaaggaatgtcatataaaggagaggagacttgccaaactagattatttctcttgtgaaagaagggagagttgggggttgtggtgggggtagttgttgcttaacttttattagttctgtagttgaagactagcaattcaaataataatctcttatctcatgactgaagtttttacgctaaagataatactgtacttggtatcagtaggccatctctttccaggtaattgttttcccagtcgtggttcctaagtgagctcagccatacacattctctcacagtccttcatttgactgttggtacatacacatttgtgaaatcccagccacagctgtgatgcagtctgtggccatgaaataatcccccttgactgtgctttctcctctctcccatcctgcttccttttcagagttgaagccacaataattcacttcactaacttattttctatatgaacaagactctagttaagacaatagaaagatcaacaaggttcttaaaaaactgaattggtagctaaaataacttttactagaaactttgtagtttatgaaaatactggttctcgtttctagtaactcatttcgccatttgggttagcaagtttagaatctacaaatgtaaatcatctatatattttggtttttaatcccagtgatgggactatgacccctccacttgagatgttttagtagtgcttatcaagataaagatagccagtgcttgctggcagtactcagtaagaaaagtcaccagacagctctgtgatttgcagatttgatgttcttgcctccaagttgtcttaaattggacctcatcttgaactgaaaatcgtgaaatacaatgatgatactttgacattaatagttactgtttgtaaaagtgaagggaaattacagaaaattctcagttaatcatgtttgagaatgtaagatggtatgattaataagctattatgacttaaatgatttatgcagtatatacaatttatattccatacaaatttgtgaagtaggcaaaatttatctttggtcatggtcttccctaccctctatagtatcccttccttgccctcaggcacagagcctcttctttcttcttcttctttcttctcctcctcctccttccttctcctcttctttctttctccttctcctccttccttctccttctcctccctccttctccttttcctccctcctttcttcctccttcttgttctccttctccctccttcttctttctttctctttttctttctttctctttcttcttttctcctcctcctccttcttctttttcttttccttcttctcccttctcccttcttttcttcttctcttttcttctcctcctcctcctccttccttttttctccttccttcttcttttcctcttcatttcttcttcctcctcctcttgctcttctttttcctttctttctgccccaattgccgtcagaatctgctcttagggaagtagctgatccctacaatggagttacctcattcatacacttaacttatgcaaatttaactattcttgcttattaaaaatttcttaaggtagggcagaaaatattttaaatataaattgcataggcaattctgtcccacatcccactcagagcatatgcccctaagtgggtgtgaaatgagaaacagaaatgtgttgtattccctttggtcttgaattcctgcttgcttctcttagagtcaacatctcattgtgctgtaggtaattcaggtgctaaagacttgtgttgttttttgttttttgagacaagtcttggctttgtcttacccaggctggagtgcagtggcacgatctcagctcagctcactgcagcctctgacaaccaggttcaagcaattctcctgcctgagcctcccaagtagctgggactataggcatgtaccaccacacctagctaattttgtatttttagtagagacgaggtttcactatgttggccaggctggtcttgaaatcctgacctcaagtgatctgcccaccttggtctctcaaagtgctgggattataggcgtgagccactgtgcccagctggcttgtgcttttttatacaaagcccctaaatacaagccagtgactccaactagtgctagaaaataaagtcatctgttctaatgctgcaggacaaaatgtctactttggccttagttaagaagtgggctgtcagtctctagcatggaaccttccagaagagattttcaagaatactcatatagacatgattttgaccttaaatgcctacctaaggtttgaatccattatattgcttaatgatttttctatttttcagggtacttgcattttaacaaaagataatggaattagtcagcttatagaattataggcatcgttgaacatcaactaaatatgtaaatggaagatgactaggtatcattttactatttttatctctgaggaagaatctgggtgacaagtttctatgccttttttttttataatagcgcttctgaaattataccaagcaagcagccatatactctagtaaatcataaggccagccttgattttattgatgattgtccaagtttctaaaaactataatatgataaatatttcaacattaaaaccatatattttgcctctggttctcaatttcttcatctatagaattaaagtattaatacttagatgctccaaatctattctagcttcacccaacttataattgttttagctctgaaattctgtaattattacatcacattggactagatgctgaatatattaataattgcattgtgtaatggagggaattttaacatcttggtgtatttcagaatcatccccgtgaattaaggttgctttaattattgctctgcaaagatactaattagtggagtgttatggtttctacggcctaataatgtttcctaggtgaaataaaaacatacttcttttctgtgccctaaattccaatttaaaaggataagagaaaaaacaaaatttttataaccttaatggacattttagctaagattttgatttgaaaagtacattttaatagaaaatagtagtgcaatattgttgcatcacagagtcttaaatagcgtggttcataagtgaggtaacttgtttttctggacttatggcccattggggagggaaagattgtctttactacttagaaagttttcatgcctttttatgctgtatcaggaatataacagctatattttggcagcacattatgggcgggggccctgtagaaaaagacaagggaccttgatcggtaagtttcctaactgaggtgctgaaccaaagccaaagaaagtttttaaacatctgtaaacctttttgttagtactgatggggcagtatgcctatttgtctctctcagatttacgactgttttattattttactgtaattattttaagagcatttttattaggctagaaagagagctgtaagtgaacatatgatactctactaatggggaacaggtgagaataatagcgccactggaaacaagaaagctaaaattgtggtagcacttcctccaggtatttagcttaggcttaagcagagttgtctgaaagttaacaggaaaagaaactacttgtgaagtgttaaaaaccacaacctaaaaaaaattttttttatcatatcatattatagtgtattaagaactacttgtcacagttaagctggtttagtagtatttgataaatacactttccctcaaacctcagataaaaacaaacaaaaaacactagatcccagcatcagaaactggtttgtttctttttcattctcctggagccaagtgtgtaacaatattagtgccatgccatcttttattaggcaaagaatgatggttaagctttccattcctcacaaaaggactacagtctaaagttaaaattcatattaattatttgaaactctgaacttactttttcactcagacaaatcgtaaagccaacccacaaaagctgattttaactgcataggtttgctgaactataaagctggaagcagtaatgacatttagattctattttagcaatgtttctatgaaaaaaactaaattttaactgagaattccaacaacactccctccctccccattctgatgactcctctctttcctaagtgtaccttggtaggaaaaggtcctaataagaggctagaagagggtggaaattctgaatggggcctagaattggaaaagaatggtggggagtcttgagggtttctgaaagtctttgattttaataatacaaagggcagatacaataaggagggcaattactatgctctgggagttacagaagtttagtaatgagcttgtccctattaatcattaatatgtgatagtggtgcagtggtcacgtctgtaatcccagcacttcaggaggctgaggcaggaggatcacttgaggccaggagtttgagaccagcctaagtaacatagcaagactccatctctacaaaaataaaaatagaaataaattagctgggtgtggtggcatgcacctgtagtcccagctactggggaggctaaggtgggaggatcacttaagcccaggaatttgaggcagcagtgcattatgactgagcctgggcaacagagtgagaccccttctcaaaaaaagtgacagaggttctaaggctacatgaagcccagtaagagtcagtgactgtgttcttttccttttcctttttttttttccctctgccgggtagtcacatctttgcctttgtccccaagagtcctgaacaccttatttcctatatttccagtactaaggttcttcctacctactccatatgtcagctttctcccgaccttttatactcagtcttttacttcaatcctataagaaaatttgggaccacagaggtgtagtgtacaaattaacagaggaaaatttaatgtacatttcttaaaatacctgacttagctctctgaagttaggggtctgttttattcagcatctaacacacactagatgctcagcaggcatttgttgagtaatgaacaaatgaatgctgttttggggtcagttcttttttggagttgaacttctaggatgaaaagcaaaatggaccctagagtggttgggggtaaaagacaggttaggaatatgatgtgaactatagcagtggtggggcagctgaatgaatcctcttgccccttttctctcccttaacattatctcttctttctcaccataagttgaggaaaaaacctattaagaaaataagtgaaattgaaattcagatttcactttctctgtattatttaggatgagattaggcttccagtgacagaaaccctgatataaaagttcttaaacaggaaagtttatttttcttccttgtaaataaaggcaatgcaggactggtttagcagctccatataatcatcaggaactcaaatcccttctctgttgttccaacagcatcaagatgtggcttctgtctctaagacagctccagctctggccatcacatccacatttcagacagacgaagaatttactgggagaataagcatatgctttctcactttagtgacattcactatgcacactcccattcccttttgtatctcactggccagagcttagtaacttggtcacacccagcttcaaggaaagctggataatatggtcttcattctcagtggcaatgtgcccagctaaagatttgagcttgtattaaccacagaagaaggagagaatagatgctagggaaactacacatttctacgatgctgatcagtaaattttcttgaaaatatatcaataatgaaagatactcaaagaattgataaataagagataatattcaatattgtatttaaaatatagattctataatatgtaaaatcagtgagggtagattgtacttaacactaaattatttacagatacttagtaaatgttgtaattgagagaagtaattataccattacaaataccaaattttaaaaaatacatcaatacctaataatttttatctcaaatacatattattcaagtccaaaacacaaagaggaggagtaaagtcatgggtgtttaaaaaatgctgtgctaagtaattaatttatattccaagtaagacaggacagttggttcaatgtactgtagctcttactaggtaggtcccacaactaatatttactgaccacttagtattaaccactcactgtgcatgatttcatgtaatcctgtggctctctaagactgctatgttatcatgtccattgtgtgggtgaggacattgaggctaagagagatttaatttatccttgtaacccaggttgttagactctaatgctgatgctttgagccttgcctccgcttctttacgaatgcttaagtccatctgattgtcatcttatcactaacagaaacatggctggaatcaattatgagaggcactgttaactaaaagcttgttcttaatttattataaatatttcttctgtccagatggcaacctgaatccagcattttggcactgtcatacagtaacttgcctgtttctagcagttttcatattatcaaattttgctcttagaactgtcctatgaattatggcccctcccattttacaaatgaaaatctaaggcatgaggagataaaataatgtgctggggttgcaatctagatctcatttttacaaagttcagattcattctaattaattgtgctaccttaagctctgaagataattgcagagggacattatggaataaaaacagctggaggcatcctgtccagaagtgaacaggttataaatgaaaataaccttatcatcctattgataagcatctccatcaaaaccacctctgacaatgccacctttgcttatatttgtttgggtataaagttagaaagaagcaagaggcttcttgggaaataaatttttttattctaattaataatcagtttttaacagtctgccttcttacatttacttaaatttacttcatttcatttccactggcatcactggtttatacctttgttacttcttaaccagaccactgcactctctttagcttaaagtgtgtctttagcttctccctacaactcagactatcctagaagtttctcttaatcttctaaaatcacacctcaacacctcatctccctgcttgcaacatttttaataatcccttgactttttcccctcctctgaatccatagcattgtctgtacctttaacataattctacctcatgggttttcttaaattggattataaggttccttagggctggaattatgattcatctttgtatacaatgaaatacctgtgtgggttcttacaaggcactgtgctctctgttgttaaatgacagttgttgaattcttcccttttagcagaagaaaaaattgttttttaaaaaactacagcctattgtcctcaagcaatggctataaaaggtatatcttcctatcttagccctgaccctgatcgagccctccccttcattaaggggcttgggtagacaaaagaaaagaaggcttggaatatctccttcactgagacaagaggccatcttccaatttatattcttccatattttagcatggttatatatgtatctgtcttcttaccttttctcttcccccccactccccccacgagatgaagtcttgctctgtcacccaggctagagtgcaatggcccaatctcggctcattgcaacctccgcctcctgggttcaagcgattctcctgcctcagcctccccaatagctgggattacaggtgtgcaccatcacacctggctaattttttgtatttttagtagagacagggtttcactatgttggccaggctggtcttgaattcctgaccttgtgatttgcccgcctcggcctcccaaagtgctgggattacaggcgtgagccactgcgcccagccttaccttttcatgtacagggggagcacgcctcatctgaaatgctccaaactctgagacttttttgaggcagagtttcgctcttgttgcccaggctggagtgcaatggcattatctcagctcaccgcaacctccgccttccaggttcaagtgattttcctgcctcaacctcccgaatagctgggattacaggcatgaaccaccacgcctggctaatttttttgtatttttagtagaggtggggtttctccatgttggtcaggctggtctcaaactctcgacctcaggtgatccgcggaaaattccacatataagtacttaacacgaaattttatttatgccaaaattatttacaatattaaattaccttcaagatatgtgtataaggtgtatatgaaacaagtgaatttcatgtttagacttgggttccatccccaagatatttcattatatatatgcaaatatttcaaaatctgaaatacttctggtcccaagcatttggtataggggatactcagcctgtaatcttaggggaagttaatccctaaatctgtttcctgactatatacttctttatacttcctctaaatcacccattatgtaccaagggattttagtgttggaaaaagatgggccatttcctaccctgggagctttcagcctaataagggagactggctagctcactggaaattatagtgcttagagataagtgctgccacagaggaaattttcaaaggaggacatctaactcagaccaggaggggtcagggaagggttctccaacgcagtgacttctaactttaggctgaagatgaggggtgggccatgattagaggggaaagacttgaactcagagggaggagcacatacacaagtctaggaatgattccagcaggtggactgtgaagtttggtggtggtgtgaggctggagaggaggtggaatggtagcactacctcttccactgaagtgcacatatttaatttgccttgagcttctcatgcacagtcactgctttcactcctttgtaccactgctgagaatcttttagggctcctttattaccccctgcagtatctaatcacttttactgactttatagactacctaaaactgaccgtttcccactactaactcactcatctcctgccagagccagggaaatctcttaactgtctcttgagttcatccagtttattctctcttctatgtcattcccctttacccatcttttaagcctttactcactccctacttctggatatttgcagtttgtggtgtataatttaatacaaaattacacgttgcctagaattgttctctaattgtttctgagtattttatgatcaactggattgtaagccccctaagagctggctctgaagctgcattttaaacagttgagtagtggaaaggaaagggcactggacctgaagtcagagcagacctgcatttgacttgtagctctgccacttgtcagttgtatgacatttcttcatgggtaatataggaataatgagatacatcttacaaggttgttgtaagaagttgtacaagtcactctatgggaaattaatttgtagaccataaaatcctatatacattttacattttattctgtagtccctaggtagaaccataatcatttcttaatgtgagatttttatggttcctttccagaccttagaatcttgaagattccagacttatttttttcctttgtgacatatttttctctaagccacatcccagctatttttattcttcctctttttcacctattcccaccccatccttaaacttatggataaagtaactttaggcagctaagaatagaatattttgagacatgagaagttcaggtgcctcatctattgatacattggataaatcttctactgtcttttccccttggtatactctgcatgcataggaacaaacttactactagcaatctacacctttacataaatgctctggacatagagccttgatcatgcctttgtgggcattcacagtcctaagaaatttatttgatattcttttctagatccattctttttattcttgattgtcatatctctccttagaccagattcttagatcggggggtcctagcaatggctttcttgttatgtactaaagtgctgattctgagggttcagagctagggatcttgcttatgctaacacaggactagacagtggagaatcagaggaagcagacacgtgtctaagacccaggtgtctcgaaaagctatggccaagttaaaaggctattttatttttacctgccacttatattgggtgcagagatacttaacattttgagggttgggtaccgtaatatctcagaccttatgttatctgtcatgttaataatgtctaagaaccttactgaggagttctaagagcttgaagaagctcagcaaaatataacgtaattagatacaaacttacatagaaaaataacttgaacatttccttcctcactaggaaaaacagcagctgggtgtgatggcttacacctataatcccagcactttgggaggccaaagtgggaagatcatttgaggcaaggagataaagaccagcttgagcgacatggcaagactctgtctctacaaaaataaaaaaatagctgggtgtggtggcatgcacctgttaaaccctacttgggaggctaagacaggaggatcgcttgagccccaagctcaagactgcagtgagatatgattgtgccactgcactccagcctgggtgacagagcaagaacccatcttaaaagagaaacagaatagacaaatctgcttgttattggaggaaaggagtggcttgaggagggagaggttgtaggaagtggcaacatttaaaattcagtattcacagcatcttaagcaataatttacactcaagaaaaagatttaataaagcaaaatcattcctgcttctcttaagaattgctctgaatagtacaattgccataaatcaagtgcatttagtctggagaccaactttttggttcaattactgtgttttaacccgtgatttctattgttcctaatagtatccttagtcatcagtggctaggaagagtctttctgggacacagagctctattatgcttagaaattgtaggtctttgaaattctttgtaaaatttaggatcattcctcctcttttagtcttccatttactgcttacattattgcaaatcttccacagtaaataatttccttaagaagagaaggtagaaaagtatcctaaaaccatctttatacactaaatctgtttcagagtaggcatgaagctataagaattttatacttatgaagtgaacaatttagactaaatctctatgagacagttaatatacataaaggtaaacttcagccccaattcagagatacccgctctcatgtcaccatatgcaccatgcgcaatcctgtaccattttttcatttcttcagctgcagatttattggaaagtttgggggttgttcttttctgatactaggaggctctctgaaatggtctctttttccagtgcactgctttcgtgacccagtctttgttctgtgccagttctgagatcggggcaattatttttaagtagtagattctctttgcttctatggtatgtgttgcccagtcttccatgtggcatcaactaatactatttttaagagatgcttttttatgactcaagggtactaaaagtagaaccatcttgtttaaccctgtcttaccccctagtattgcccggaagaaaggcactggtctctggaagaaagaccactttacttttttgctgcatggagttaatatagtagaaactcatcagacagtacttaatttaacatacatacatgcaaatgtaccagaacactttaaggtcaaatttggtccctgtgataacaacaacaacaaattagccccattcgagataaacttctcattcccattcttcccctactccaaaaagttatctgtactgtagaatgtttaataattattgtgggaagatagtcagatacaacagatatatttaaaaagtgaatgcccttcacccataatcccattccctgaagagaaacttgagaagatttattttcaaatatcataaaatttatatgatctattaaaacctaaagctataaaactttcagaagaaaacagatggggaaaaaaagtttacaacctgggggtaggcaaaggtttcttatctagaatacaagcatgagacattaaagaaaatattgacaaattggatcatatcaaaattaaaacatgattttcaaaagacatcattaggaaaatgaaaaggcaagccacagactgaaataaaatttataacacatatatcaaagtacttgtattcaaaataatataaagaacacagcacaagaaaataaccaacccaataaaaaatggacaaaaggtttgaactgatacttcacaaatatatatatatgtatttaaatgaccaataagcacattaaaacatgttcagtatcaaaagttatcaaggaaatgcaaattaaaatcacaatgagatattgctacattaggcatcttgggccagataatgctttgttgtgggacggggagctgtcctgtgcattgcaggatagttaggagcctccctggtctctccctgctacataccagtaacaacctgctcctcaccagttgtgaaaattgaaaatatacgcagacattatcaaatgtcccatgggagaaaaaaatcacttgttaagaacaactgcactacacccattagattgactaaaatgttttaaattgacaatgctgagcattggtgaagatgtctcttttttttttttttttttttttttttgagacagagtctccctctgtcgcccaggctggagtgcagtggcgcgatctcagctcactgcagcctccacctccctggttcaagcaattctcctgcctcagcctcctaagtagctgggattacaggcacatgccaccaagtctggctaaattttttttatatttttagtagagacggggtttcaccatgttggccagactggtctcgaactcctgacctcaggcaatctgcccacctcggccacccaaagtgctgggattacaggcgtgagccaccacccccagccaagatgtattttattgttttttagacagaatctttctctgtcactgaggctggaatgcagtgatgcaatctcagcccactgcaacctacacctcccagattcaagcgattctcgtgcctcagcctcctgagtagttgggattataggtatgtggtgccatgtccagctaattttagtatttttagtagagacagggtttcactgtgttggccaggctggtcttgacctccaggcctcaagtgatccatcctgggctcctgaagtgctgggattacaggtgtgagccaccaggcctggcagaagatgtcttatacactgatgggtgataatataaaatggtacaactactttggaaaacagtttggcagttacttaagaagttaaacctggccgggcgcagtggctcacgcctgcaatcccagcactttgggaggctgaggcgggcggatcatgaggtcaagagatcgagaccatcctggccaacatggtgaaaccccgtcgctactaaaaatacaaaaattagttgggcatggtggcgcacgcctgtagtcctagctactcgggaggctgaggcaggagaatcgcttgaaccgaaactgggaggcggagaaggttgcagtgagccgagattgcgccactgcactccagcctggcgacagagcgagactccatctcaaaaaaaaaagttaaacctacacctattatatgatttagccattccactccaagccaagggaaattaaagcatatgttcacacaaagctattcagaattcgtacagaatgtactattctgggtaggtgagaattttacccataaaatgaaaatcttaaatacaaagaactttttctttgttgactgttctttggtctttttcacacttccttctgagatcattttgcttcttcctgaactgacactccttcagttgaggatctgttggtggtagattcttagtttttgtctcttaaaatgtgtttctttcactttatgaaagatagtttcatgtgttaaatacagttcaacaatgatattttctctcaatattttgatcctctggcttccattctttaaaattaggctgtcagcttagttttccctttgtaggtaatctgacttttccctttcatggactttaagatctctttccttgaaatttttcagttttactgtaggccaaggtataatttttttaagttattctgcatgagattcattgtgcttcctgaaaaaaaaaaagagtattggtgtctttaatctgttctggataatccttaaccatcgtgtcttagaatattacctttgtcctattctttctgttttctccttccaattatatatgtattagaccttctatttcatcttaacatgtcttttattttctctctcataaatttcatttctttgctgtatgtgctatattctggactcttcagatttactttctagtttactaataattttcagctatactgagtatgctgtttattgaattttaagttttaattattataaaaactatttcattcattttcaaatctgtctagttattttttgatagtttcctgtttctcacccatactttctatttcctttaaagttttaaaaagcatattgaactggccttctgtatctagtatccaaagtctttgcagatgatttctggcagtcagactgcatctgactttgcagtcttaggtgattattgtttcctgtagtcctcactaatggcatctttttgcatagtactttttattattgtaagcttatattcattggaattgtatctccttcagagaaaatctctatttatttctaactggaacctgggggacataaccagcccactttatactaaatatttaccttgcttttaagagcaggtaggtaataagggaattcatcccccacctccttatgtgtgatccaccttgtgtttatgaatattcaggggagattttaccccttccaccaagaataaaccttaaaacaggcaaatcttctgtcttcttttgtaaatggggtgtttttccttgttcatgctttgagcgtttagccccttgggttttggctttatgatggggtctctgatctacctcccaatttcccaagtcctaggatttgccttctgttttctgtgctgctgctctaggtccctggggatccacagctgccagccttagtgctcactgtctccctagactcctcctgtcggtgggttttggtttctgaggatttctgttactttgccagttcggccattttaaacaatatttcttacacacaggtctccaatttgtgatagttccacttaacaattgtttgactttactaaggtgtgtaagcaacacacattcagtagaaaaatgctgtggaaagtagtacgatactcacaatgctgggcagtggcagcaagtgacagttctcagccacataatcacaaagacagacaaccaatactctaccatgttgccagatgattttgcccaactgtaggctaatgtcagcattctgagcacatttatggtagtctaggctagactataatgtagaagatttggtgtattaaatgcattttttacttatgatattttcaacttattgagtcataaccccattgtaagttgagaagcatctgtagaaatatttttaggtattttgtccaacatgagtaagaagcactaatatcgaggtcagtttttaacctaatctgggagagggcggtgctgtcagggctttttaaggcttataggaccattacccttatagaaaatggcttcctgctactgtgctatccaagttcttatttctgctttatagaatttttctgattcttcctttgtgattaagtgcttcactattccttttttctctgctatcagtttaatggtagtccctatgccctaataagttactatggacttagaaactagataaagaagcttgttataattttgtaccaagtaaaagtaaattgtctctaagagaggcaggtgaagggttttccactgaatacagtacatatgctatggtatgtaaattttgtgacatctattttacatcttttttttaatttgttctagattcatgagattgttttttaaaaagtcaattgagatataatgaaatgttgctatatcaatagtcaacatctattttggcaaaaattactgattttcaaatgtgtgggaaaacattttaagggtgtgtgtgtgtgatcattgaatttcattctacagaaaaaaaaatcactcattctttgagtaggcagtaacatatttagccactaagaacaatctacaatattctcttatgctttaaatatatgaaagtgactttaataatgattatttgacaatgtaagtcttcatttatgtttttatatttttccttttacataaaatgttacattttgtttatgccaaatggtaattttactcattttattttgttagatccaaacctgttgctttctctttagtattctatgtgcaaagcctgtaacataatgaaaatgcagtttaagtacctatttgtatgtgatgtgccagtagttgtaatttcaaagtaagataaacatatgtccccaaacatacttccccaaatccttgcacctgggacagaatgtactcttaacatagaccaaaagggactcataaatactctgtggttgtgccttaaaactgaacacaacataggcacatccactaacattatttataaaagtatcaaaaaaacatagtggatcatattttggaggttaacagtcactgttagcatggtaaactgtcaagtggtagaagattttccttattcagcatgataacatttacaaacttttgttcagaagatgaaatttgagaagacttttgaaggaagttatgataatgtgtccttaatgaaactctgagagaagaatgttttcaagtgtcagggagaaatgtataaagtttcaaaggggaaccataagtagataaatggaatcaagaaagttgggataggattaacatgtatgaggagggcagtaattagggagaagatatattgagagatgttatagaacatttttattttgtctcaatggggaaccagttcagatttgctggagagggatactgttctactgatttgggtggtcacagagggtggagtgagcagtcatacagagcagattgcagggaacatagtgcaggggaagacaggagaagatggtaggagttagggtcccttggcctctttctgatgggcacacaatcactggaatattaacattaacaaaactaaaacattatcaggcagcattatggtatagtagaaagaatatgcttgagttctaacctttactcaggccccttgatgtgtggccttgggttaaatacttaacctctctgagtttcccatttctaaaatgaagatagcatgtacctaaggtgttatgatagttaaatgagttaaaatacataaaatgctttagaacggccaggcatggtgtttcatgtctgtaatcccagcactttgggaggccgaggcggacagatcacgaggtcaggagatcgagaccatcctggctatggtgaaaccctgtctctacttaaaaaataaataatacaaaaaattagccgggcgtggtggtgggcacctgtaggaggctgaggcaggagaatggcatgaacccgggaggtggagcttgcaatgagccgagatcgcgccactgcactccagcctgggcaacagaatgagattccatctcaaaaaaaaaaaaaaaaaaaaaaaaaaaaagctttagaacaatgcctgatgcatacatatgttttagatattctattaatatcaaatcgaaactagtatagcattgccctgcttctggaatcatatcttagattaaaaatctgagttactagtttaaaagctgtccatcaattggcattcatttacctaactgctacaataacaattagcttttcagcattacatgcctttgtagcttaaggcattcttcattcctcagtccaggtgccccgttaggagtaaaaggacttcaaatgggtgcatctctataggaaattaaaagaagaaaggagaaaggaagaagatatggatgttgttctcaaaaaatatatactgggaaggaaaaaaaaaaatgcctggcacatagtaggtgcttaattaacactggttgactgaatgatgaataaataagactagtatatccacatatataaatttttataaatttaaccaatcctttagatatagtatatgtgtattaatgaaactttcagtaatatttggatggatactgttctgaattattagggtttaaaagtccccccaaaaacatgagattgatacagaattgatgtttcttccccaaatgatatattaaactacctttttttctgattcaacatagcttatttatctgtgacaactgaagataaaggagaaggatgaggccaggtgtggtggctcatgcctataatcccagtaggaggccaaggcgggcggatcacttgaggtcaggagttcgagaccagcctggccaacatagtgaaaccccgtctccactaaaaatacaaaaaaaaattagccaggcttggtggcaggcatccgtagtcccagctaattgcgaggctgaggcacgagaattgcttgaacccgggaggcagaggttgcagtgaactgagattgtgccattgcactccagtctgggagtgcaaaaaaaaaaagaaggatgaggcaagatatgactgataaataaaacctagagctagtctccaaacttttcccctactctagggttgtatggaaaacaatgaaatattgggggaaatacacatctatacacttattttacagcatcctacaatgttattagcaaacctcctttgttttaaagtacatggtgggctcggcaaggtggctcacacctgtaatcccaacacttttggaggctgaggcgggagttcacttgagtccatgtagcctgggcaacataacaagaccccatctgtacaaaaatgtcaaaatattaagacagtcatggtggcatgcctgtagtcctacctactcaggaggctgaggtgggagaaccacttgagcccaagagttcgaggctgctgtgagccatgatcaccccattactgcctgggtaacagagcaaaatcctatctctaaaaaagaaaataaagtgtctcctaaaatggtgggtgaaggagattattaatgataatgacaaagcaaactgttctactttaattccttttttagggaactacaaccatcaaatggtttaagtagtatttgaagagaaaagaagtgttgttcatgatgatagtcacagaaaatattggaaactgctttagaatataaatttggcaaactgaagcaaaatgaagaaaactgttaactattgtttcacagtgtttttgtgtctatattgcaggtaatgctctgtcagtttgagcaaatctgaggtctgtgctaaatataacagtgatgaaatctgtaactcttgaaaatcccttctaaatcctctgaaaaccttcttctctccaaggagaaggatatgtattgagtgatagaaataaagaggaaaaaattgtatagaattgcactgtgcaatttgttcagtttgcttgatcctgcatttgttttgaaagttgtatttgtggtatggttgtttttactagtattttatatttttggatttggcctgtagcatttcactggatatttctacctttattttctacccacagcaagaaagaatatttcccacaaaattttttttaactaaaaatacactattattttaatggtaacttgatgtatacagtatctggcataataaagatgaaacaaataatcactacaatactaaaatctaatctattttgccaagagttggtgagaagattttatcagttacttttaacctaggacaatatatcctgttttataatttgttgttttctcttgtgacaatacataaaaaaaagaaaaaaagaagaagcttaggcctcaccggtatctggagcagttgagtccttacctgtttgtctgctttgtgattggctaaaagctgttgctaagtttgtgtttttgttcttagggaaagttaaaagttgagtgtgacctatttgaactgcatcctgctgcttttgactctgctttgctctttcacctgatccacatacttttttctggcatcttttgaagtttagattttttaaaacccacttatgtataaatttagtgtgcaatatttgaagattgtgacattttaatgcgtatttatgatctacaaactaaagtactgtagtttaatttttaaaatctaattgaatacttgaaagttgaatttattgacataaagcaagttctaattgtagaaagcaaatgcattattttaaaacctgcctgttatactaaaaattatctggatatcaataatatctttgttaataagaacaaatccaaactacttaatttttttcaattgaaatgtaatatgaaaatagttattaggtcaaatttttatgatttaggataaagactattcttgctcatactggcatgtgtgtcactaaaggataagagtgactttatttatgttttcttgaagagggctgaaaggactgataatgctttaggttatagactagacccaggacaggctaaatgaaatttacattgtgaaggtgagtttggtctataattcagtagagaaacatgaactgttgtagttccaacagctttttctctttaaggctctatttggcattaatgagaataagactttgaactagattcccccagcactctgctggaaccagttgaaattattggagcattctctgaaccttaaagcctgacccaagtcttgggtgagtgatgtagagagccacagactagcttggatcctccaaacctagtgtgagttccaggatacagatcatgaggggtgtgtgtctgtgtgtgtgtttgtgtgtgtgtgtaaaaaatgttttaatttctttgtcagcttagtctttaataaaacaatattactagaattctgatgtatatagtatctaaaactgtaaaagtgttttatcaatgaattatttaagttcaaataagaaaattcattatcaaatcaattagtgaaaacagtggggctattttatattttatattttcagaaaatttgaaattaaggggttatgaatgatggttgcagtatttctatattttcttatatgcataatatcaagaaaatctgattcacacaggtaagtgcttttgtgggtttttgaaaatatctttatactttcattttttatcgtgctctacatgttcagagaaacttctctagtaatgaactatagaagtcatccctgaaattatagacttagataaatggttttgagtgaaaactttttaaatagttcaccttgcattctcaagatacgctgcagttaaactgatccagaagcttgaacaaaaaagtgaaaaaaatgatttcaaacaactacttgcattctttattataaacataaaagttaaaacaataagcaccaaaatgtacaatatccactaaaaactaaggaatcatgatgggatgtgcaatctgttccttcaacattacaaaattgacagttacaccctttcaggagcacgtaccaagcaaatgtgcctgagcctctcctggcatctttaaagcaaaatatccacttgctgtagcagttcactcactattatagttttacttcagctgatgtagacacgcattaattttttaaaagactagaacacataaactatacccctcctaatcactgacacatttatacatttacaagaatgttcaaatgtgctcacacagatggtgggagagacattatttaataactgaattattactggtaacaaattgttgttttggcagtctccattgaatttaatgttgatatacatttgtaggttactttgaaaaacaaagttcaaatctaatattttataatatctctaaagtatgtgtaaggaatggattttaagaaatataatttgaaaaccactgataatatacaaggaagtccagagcaggaaggggccaggttctagttagctgaaagcatagaactctggataaaatcaggaattatatttttgctatttcttcttcttattattgttctatagaaagagacagggttctcgccatgttgcccaggctagtctcaaactcctggcctcaaatgatcttcccacctcagcctcccaaagtgctgagattacaggcattgagccactgtgcctcgccaggaattatattaaaagattagaactttagagctgaaataaagtttgagagatcattaagttcaattgcccttcatttcaaatttaaagggattacaactagagaggttttcaggctttttattttttctttgcaaaggtagtaaactagatgaccctctatttaatgcttcctaacagaatcccaagctatctgctaatctgtatgatttatgtaagtggttaagtctaactttaaatcccaatctcgaattaagagatttctgcttgttcatatgatttaagaaatgcatatatttgggccgggcgcggtggctcacacctgcaatcccagcactttgggaggccaaggcaggcggatcacgaggtgaggagatcgagaccatcctggctaacatggtgaaaccccgtctctactaaaaatacaaaaaattagctgggtgtggtggtgggtgcctgtagtcccagctgcttgggaggctgaggcaggagaatggtgtgaacccgggcagtggagcttgcagtgagccaagattgcaccactgcgctccagcctgggcgacagagtgagactctgtctaaaagaaatgcataaatttgacatttagtaaatatttacaaataatgaatgattgaatgctaaatggttacatagtatcaagttttctgttaattggtaaaataatagcattattttaaggctcaatgccaaatagagccttaaagagaaaaagctgtgggaactacaacagttcatgtttgtctattgaattatagacgaaattcaccttcacaatataactttcatttagcctgtcctgggtctggtctataactgaaagcatataaaatataaaatatataaaataatagcattattttaccaatgtaaacttatacgaacatatattttaaaaattagactcataacaaattaagagtgttaccctctccaatttatatcatctgaataaaatactattttagtatttctgagttatttgccagaaaataaaaatgcaaaaattaagaaaatcatattctctattactacaagcaaaatgatcttgaattccattcaaatctgaattcctgtaaaaagcatacatttttaagtggtattatatcttttattgtttgagagtatgttttggcaaaacagaaagctagaatggataagcaaatataaacatttttatttgatgaactatagtcccctaaatgtatctataccctttgggtaaaggggaaaatggcccacagagtgagaatttgggagggcagaagaacagacaggaaagttcagtgaacagcattttatttttaaaatacataataacctacaagtagtctccagatttggccttgtacttgtgctcaggttaagaatctacaacttaataccctcttggaaagcaagagacctctgaagaaggcagaaaaagaaggtggtttaaaggattataggacctacaactaaagattatcaaaaaggaactgagtaggggttctttgaactgtgcaagaaaagcacatattgcagaattctattcaccacttggtagtaataatcatagggtggggaggcatggatagggaaggcaggatagctgttataaacaaaaacaactggattttaaaactttagaatattgtcattggtttgtttctttgaataaaaattaccgttagtataaacaaagcatttaaaattctgtcatgattaagctaatgactcattaatatgcatttagcccaaacattttaaccacgggtaaaaatcctatggttaaatgggattagttcagttccattaagtctgtgggttcaggataagttaaagatattaggtttggttttaatctattttgaatggataatttttaatattatgcctggctaattcctcgtatttaaaattataggttacatactaaaccagttcttggcctgtgcacaaatagaagcactatgagaatttcatgtgttcacattgtttaggtacaaatgaaatctagcccctcaaaaaactgttagaaaaattatacaacacagagtatattcagtctgagaaatattttctacttgcatatatttagtatcttttgttgccttttttgagtttgtatatttccttctccttctttaaaaccttcagtagcgcctagcaacatatggcttaaagtcctaaccgtccatttccccctcacattcacctttttcatagacctcatagtattccaaattaaacccattccttcttatttaactcagtgatgatgctgaaaagtagcctctaaacattgtaatatgtctgaatgaattctcccacttaatttttatatctcaacagacactttcttttctatcacttcaccttggatagacctaaggattatttaaagccaaacttggttacaaagtgtttctgaatcttgtcaaacaatggtatcttgtcagacacaggcagtgtctgacttgtaagtacatgcctgacttaacaagtgatccatacatgctcttgtcagaccctgtatagctgctagcctggtagtgcaggagagcagtcacagaaatatcaaagaaaaaatcaaaggagcttgggtatctatgagttccaaggagaagtggagagattctgaaagacagattgcttagcagagctgaacccagtagaagctaattccctcacagagtcagcctgcctgcctataaacaggcaggttttgtggcccctaagcctcaaaaatgtttacctgaatagtgaacttgaaattcattattaggctttcagttaagcttaaacaattttttaatggaaacatctcttcagagttcattcgatacataatttttgagggtctcctgtgtgcagggcactaggacattggaaatatagcagtaaaccaaaaatacagacattctgattttatgaagcttatatcctattgagacaaactaaataaataaataggaggtatcagtaacttacaaaattagtgtgatttgtttgagaagccagctttcttcctaaaacgtaccactttttgagaaacgggggtcatgtgaggaacatgtaggaggttgggtagattcagatgagatatgtagtgaacaggctttgggtggcatgaggccaccaaaggcccagaaagagacactgagaggagtgacagaaatatggaggagagaagctctcaaagcccaagatcacccattccatgatttcttaaaaacaaaacaaaacaaaacaaacaaacaaaaaaactcaccctgagtaaaagcaagggagataaatttttctgtctttctaccctcttttcttgcctccagaatcaagaacttaggtgaatacacagttatcaaaattgtaaatatatattcggtaaatgcagcaacctcatatagtgactgctgctttggattctgacagacctgagttctaattccaggctgaattttacaagttttataactttggtcaagttgcccatacttttagtttctatgtcacaaatttgtaaaataaaaataattacatctgctttatacatgtaaagtgttgtgtctgatacacaggagttaacaaattactggtcttattattatcagcctagaaaacctgaccgttatttaacacattgattttggggtaaaagcaacttttaaatttaaaaccactgacacttcttggaatactacttatttacaaatattggtgatgcctcatatttctaaacagctatgtagaaagttaaaacactacatttctaaaagaggaaactctaaatgagaggaaaataccaaagacttgtcaacattcttgctcctttaaagtgatataattctaaaaattgaagaactgaaaaaaaaaaaaagtatagagcaaataagaggatcagtttaaagttcagtgctaaaaggatcttaatgtacccaaaacatgatgttgaaaagggaaaaagtgcttagcagacaagctatgtagataaaaacaggaagatatgagctggaggagaaaaatctagacaaaattagtaagcagaagtagtcttataaaccagcatttgttctaaatgaaacgttttaaatgacaataggggatttttcaagaatgcttaaaccacataaatgtaacaaatcccactcccactcttaaaggagttctttggtttaatggctaaaaccattactgtatgttttctaaccaattactgcattaagtataattctgattccaatgaggagatgtgcaaatctatagtacagggtttaacatgtggtccataaaagtatgattatgccttttaacctaattactgctttttctactaaaatatatctattccttgtcatgaattgattatactttttaaagacctaatgcgctcagggaagccacttggtcaggagagcagataatctgagatttatctcctaaatttcaaaaacaagagtttgaggcatgattgcctccctcaaggaacttaactaccatactggagagacagaatccactgtcatcttctacacttctctcccttcccattgttccgaagactgccctcttgccttgccaagattgcctcagcagcctaactcatctccttgcccctagttttgccccttgcaatatatttttccaaaccttagctgacatgcaaatctgatgtcactctacagtttacaactttcagtaactccacagtacccttaagaatgaaatccgtattctttaatgaagcttaacactccctcattactgcttatctttttttttttttccctgttgccaggctagagtgcaatggtgcgatcttggctcatcgcaacctctgcctcccgggttcaagcaattctcctgccccagcctccagagtagctgggactacaggcgcacaccaccacgcccagctaatttttttgtattttcagtagagacggggtttcaccatgttggccaggatggtttcgagctcctgaccttgtgatccgccctgcctcggcctcccaaagtgctggaattacaggcgtaagccaccacgcccggcctactgcttatcttttacctaaactccttccgttactctccttaccctcttttccagacccattgagcttcctgtattctgcttccctaatggatcactctttcctttttctgggcctctgcatatgctagatcttttacttagaactctgtgtctattctcccaaactctcccccaaattttctttccaaggcctctctactaatactctaagctgtagctcaggtgtctttttccttcaggaagcctatcttgaaccaccattccaagtgcagagtcccctaatatttcatagttctctgttaaaatcaagtcatttgacaccactctgcttttacatagattatcagcttgctcttcagaaaaataaggctgagtgcattactgctaaggacagatgtagaggcaatgaacctcactttgatacagttgagtaagttgaccaaaatctttttaaaagaaaggaaatatttcagaattactattacttcttggattaaatgtcaggattcttcctgagccaagttcgtaccactgcactccagcctgggcgacagagcgagactccgtctcaaaaaaaaaaaaaaaagaaatatcaaaattaaatgtttaaatagcagactttgtaaggtagctctggcctgtactgacaacctgtggtaaatatcaaaaacacagccctttgtaatcactgttctgtgttcaggatgttcatcttttcagcagatgtttatcgcatgcctgtatgtgctcagccctagaggttgagaggagcagcaccttcagaacatcaggcctaccttcgaaatccttggaaaatactttttattgaattgtttgaaacaaaacatttcaaaagttaaatctgcacaatgatagatgcaggttaattaatacatttattgggctgggtgtggtggctcacacctgtaatcccagcactttgggaggcaaaggcgggaaaattgcttgagtccaggaatttgagaccagcctagacaacataatgagaccctatctctacaaaaaatttaaaaagtagccgggtgtggtggcctctgcctgtagtgccagctactcaggaggctgaggtgggaggatcacttgagccctggaggtcaaggctgcagtgaactgtgataatgccactgcactcatcctggctgacagagcgagactctgtctcaaaaaaaaaaaaaaagaaaaaaaattttaaaaatacatttgttggaactcttggttactgtaaatttatttggaggcaacctttttatgttggagaatagagtgactaattcactctagtgctctatagcagagaacaagaaattagtactctttgaggaatttaggtcagtctttatagagaccataaaggaatcttgacatttaatggcttgaaggttctccataaaccactaaattagaatattaaattaaaattatttttcttttcacataaggcagcattaaataataatttgaaactatctgggggaaaaaggaatcctaattggagcttcctatacaatttcagtatatctgaaatatttcttcaataaatatttatcaagcactaagtatcagcctactatatgcatgcagttagcagttttcacttgcatttacttattttaagccacttttgatttaactgaatgcatgcttttcccttgcctctcattagaaaatggaaagataagcattcttcattttacaaatgtcataactaagattatgccctactagacaactaaaactgtgattccttcagaaataaaatcatacctcaactcttctagaaccagagtcatcatttttcacatacttctacctaactagcttttgcagctcacaatcccatacatcaagtgcatttatgtgtccaactcattcatttacaaccagtttatcttgcagggtatgtcatattgctgcaaattgcatgatgtactgggtttgttttgtttttgtatttgcttacggctgagtgggcatttgattgtactgtttgtttttgtggctgtgctcagtggatgagagcttggaagcctctgtagccttttcttctatatcgacattaactcaatattgcttcttttgaccagtaaaaaatattttgggtgcattagctattttttaaaagcagtatagagaacatatatcatttatcttatttattaggagataaataaaaagtaaccattttgacatgccactttaaacatgatagttgaagagctaaaagagtaacttagttttcactgagacacggtagcgtcacttctaagactgaaacttattttcatttatgagtcctgttctgtggccataactactgctataaattccacttgtttccttgtcagaatgttccaactttttttgttttttaacctgagcacttaagctttgaaaacagcataaacatgcaaaaagagatctaatttaggaatttgtttcttttaaagagagagaatagagttatgtaaagaaatagtactgacacaggactggagggatctgggttctgggcccaacaatgtcagttgtttttctcctttgtaacctgtattttcccaagttcctcatccgatttcagagattgaaattctgtctttataacccagggagggcgcttatgaaggaatattagaaattgtaaagccttcgaatatacttgagaggaaaaaagacgattcagagataggctaccaaggtttattatctgtgtaggggagtgatatttatagcttttacgtagcttagcaaaatgaattttgcattgattataggccaaagtcctgcattctgctgccgattcagcgtcgtttgggcattatgggaaaggaagaagggaaatttcaatagtttatcgaatttagagaacttcattactcctggtgctgtcagaatcagtctcgaggttggctgctgtttggttctaggtaaatggccgagcaggggtgtagggggcagattcccctgtccctgaagcccgaagactcgtgctgcaccttcctgacagtgcacgctcacctcgcggccctccagagcccattccgtacctgagaattagctgttcgtggggaacctgggcccccaaggtgatttttcacctcgccgcgtcagaccgccagttcccagcctccgcgccggaggggcggtgctttgcggggacgcgagcccgcattggcttgcgtggccgccagggcggtgaaatgacgggcgcggggcggggccgcgcggcttgtttgtcggcgccgccccgcccccccgccgtccgtgctgactgaggcgctgcagccaggagccgcggccggctgcccagcgctcgccgcctccgcgcgtccgcagccgtccccgcgccgacatgcgcttggccgccgccgcgaacgaggcgtacacggcccctttggcggtctcggggctgctgggctgcaagcagtgcggcgggggccgcgaccaggacgaggtacctgggcgaggggctgagcgggccgctgggtacctgggcgggtgggcacccggccgagctgccctgtgcaacacggaggtcacgttgcctcctcacagtcgctcccggtcagcatccgaaaacgctccccagatagggcgggctcccggggagcagcgtcccggccctcctgcgcccctcgggggaaggggttgcctgcggtgggtgggagacctgcgcaccgtgagtcgtccctgggcagaaaatgctaagctgggagagactgcggccgcggtcatgtaaatgaaagtctccaatacgtaaataacattgtcgtctggacaagtctccacaagtcagaaatccagcagacctcgagtcttgagggtgaaacagcctgtggatatgccccctcgattgtcttgtcttgtgaaaacagattatttagccaccttcatcccctttgcctcctacttaaaagagagagaaagaaaaaaaacacatttgactcagggaagagatgatgttgcctggaataagtgtgtcctgcaagctctatgacgttatgcacagcgtttactcttgcgtattaagccatcccttttctgaattgtcctttagaaagaggtacttaattgtaacattttgtgtttttttctaagtggttgcaaataggaaaccatttgaaagttactaatgtaaccttaggtaaaactcgaaccttaaatttggattgaaatcaggtgctgtcagagtgttgccttagttcaagaaatctaaatgtgaattattttttctgcagctttactcactaaaatgacgtggtttcgtgatttctttaatggagtctattatcagtatactatgtatattcatagaaacttaaatgaagacactttgtcatgaaggttgtaaagcaccaaatatttttttgagattttaacatttatggacatattagatgttccttgtttacagataataaaacaatctttaaaaatctcttacagtatcgctttggaaactttaccaaaaagtgaaaacagtatgaaagtattgaattaacatttacagtttctgtttgcgggtcataatagatcttttctctttttgagtagaagtgagccccaatcatcatgcttgaatagatctgttatttctgctgatgtttgtgtgcagagtcctggttcttgctcagatctagaatttctaaagatagctttgtaaactaaaagataaagaaatagattttggcttgcatattgttacagcgcttatgggattgtgttgaggaaaccgggaagctttgtatagttgtatttcatttttaatacatcccaacatgtgagaagataacttaggaaggaatgctttataggaaaactattcactttacaaaaagaataacacaattctttcaaatagctagcttccataatgcttttaaattaaacactttcaagaaacggaactcctgagcaaagtatagggcacaaatatggcctaagtattacaaatgcagtaacttaaagtcagtaagttttttttctaaaatatagttcatagaaggcaaaaaaaaaaaaaaaaaaaagtacctggactttcagtatttctgaattacctattagtattaatgacaatattaacataattgttagtacattttgctatagtaggcatatttctaacacttctagatctctccatttctatttaaattttttgaatgtcgaaaggccagcacccagctataggcaatctcccagagaagggcgagtgggatgggaactttcactttttatataacatatctttaccttgttgaaatgtttttcaaaaaacacatgctgcttttgaatttaaaaaataaaattactgtgaatgttgtgataatcacaacagtaatagtgtagcgaggaaaacaaaatgattcaaattatttgtgtatttttacttctcaactaattttgcaggtgggtagatactgtaagccaacaatgctttcattttgcacttgtcattcattcattatttcacttaaggatattgatacagatgcataaatgtatctcacaaatttgaaacatctgactggaacagtacttttcagtacacaaacattgattcatacagtgatacaataaaaacatagtctttctgtggtactactgtcaacattcactacgaattttcactctgaaaattagtgttttgcattatacattgaggaaacatcagaagtaatattgtgatggtggaaacttgttgtctctttcaaagatggttattaggttgttgaggggaaaagattgttctcatgttaatcttccagccacaccttcacagagagcctgtgaggttagtgctgtgattagtatctacatctgcttttcaacaaggccatttgttggtggcagttctgtctcctagaatctggattggccaaaatttgttcaaagtctgtagttaagtttcttacagctacagatgaaggaataattgaattaacctaaataggaagctatgaaatgtatttagtttggcttatgatcaccccattgaacacccgcagtgccttttttgatcagcatctactagaaaagagttgtaaccaatttaacatgtgaccaagaagtgtttcaaaagtgagttttccagaaaatggaaactttttataaaccaagactactactgtataataacagtggtatctgtaagaatctccaaggtatcaagaagtcttaaagaggctcaaaagaataataatgaaagataccaactctagaaccagatgtcattgattcagcccccgtctccaccactcactagtactgactgagctagaatacttgggttcaaatctcagggctttccttggacacagggtggggaacatcacacaccggggcctgtcgtggggtagggggtggggggagggatagcattaggagatatacctaatgtaaatgacaagttaatgggtgcagcaaaccaacatggcacatgcatacatatgtaacaaacctgcacattgtgcacatgtaccctagaacttaaagtataattttaaaaattaaaaaaatctcagggctttcatcagttatgctaaatggagataataatagtacctgcttcatagattaaggtaaggattaatctaagactcttgactttttcatgaatattgtagaacaccaaatactctttctaaactttagtatcatagactcatgttctttgtttacaggtagtataatttaaaacagtgctcagctcatactttgtgttagctgctgctgctgctattgctatttattatcatgagccctagttgctttttcagtgttattcaagaaataagccgaaaactgaaaggcaatttggttctcagatatcattgactagtgttagggtgccagccacagtctagaaaccccactttaccctctcttcctctgctacttctgagaaattagacagccaaatctgttagaccttatacctaagactagaatctataacaaaagactcacgtttgtataatttgtaaaattctatagtttataatatagattataatcccacatagttgggattgatggtattattattttgtcatcatccctattttacagattaggactcttcaatttggaggctaaggaagaggggagacagtgttattaatatgcccactaaatttggcaatagggatggacttacaaagacaagaattacatagaacccttgccataaatataggaaatactctgtttctcaagcattcatagccaccttcttggaattgtaaacctattgttttataataatttggcatataaactatatatttggtagagaaataaaaccagaataatataatttgtatacctctttgtttctaaacctatgtgctgtcaatctggccacatttttaaaaaggtaactacctttcatgatgctaatgtatttgtaagataaaggcctagaaattgaatcagtgaggttttttttcctgcctactgataacataatatatacatattctgcactttgcttctcctccccttccccattattgtaatataacttgaagagcttttaaagtcaactcatgtagaagtgcttcattttttctaaagactgcatgctactctattatatggtcatgctgaactttattgaaacagccttctattgaacactgagattgttttcaacctcgtactattagaaacaatgttgcagtggttatccttttacgtatggcatttcacaaatgtgagcacatctgtaggttaacacttaggatggaattgttgattcaaaggctatgggactttttaattttgatcactattacaaattgcccttcctagcggttgtagtaatatattctctatactcttttttctcatacttcaaaacactctcatcagcaatatataaacaattaatgacagtttctctaccctttctccaatacagcctgtgatcaaactttttgatcttaagcaatctttttggaggaagacagtatctcagcatagttaacttgcagttgttttgagtgtcaagcatttttcaaccatttgtattttcttttccttgaactgtgttgtttgctcatttttaaaatacgattgttggtcaggtgcggtggctcacacctgtaatcctagcatttgggaggccgaggtgggcgcatcacgaggtcaggagattgagaccatcctggctaacatggtgaaaccctgtctctactaaaaatacaaaaaattagccaggtgtggcggcacacgcctgtggtcctagctactcgggagacaggagaatcacttgaacccaggaggcagaggctgcagtgagccgagatcatgccactgtactccagcctgggtgacacagcgagactctgtctccaaaaaaaaaaaaaaagattgttggggattttcgtattgatttatagtaatctttctttaaaatttagccctttgttatttgagtggcaaatataattcctagctttctgtttacttttgactttgtatatatttatttttcccatgtgaaagtctttatttttatgtcattaaatttatcaatcttatattttatgacttttggcttttgtggtattcttaggcctgctgcactccatgagtgttttcttctagtactataatgttttttgctttttttctaagttttcatttttttcttacatttaactctgatttattgtggggtaaagcatgttatagtgttccagcttcactttttttctgaatggctatccagttgtcccaagatcatttgttgaataattcattttcccccatttgaaatgacaccttttcgtatactaaagtcccaagtctcttagttataaaacagtaataaacccttgaaacaggcattttcctaaaatacattttgtttaagtaagacagttttcaagattaaagaaattagaggggataaatgttaattttagccttagttttgtccaataggtattgtttcaaatgtatgtaattggatgagaaattcagcagttagaaaagctaagagtcatcattgtatataaatggctgctattggtgccaaaattatatattgaataacagggatgtcctctggcattcattacaggatgttaaaattgagacacacacgtggccagaccagtgaattaagtgcctcctctaatgaagggtataatgttaaagcattactatcttcagtgtaaggatggactaaccagggagaagtcaccaacctccagtataagattattttatttaaatattattttatgaattctgttggcaaatataaactactttgaatcttgatgtctcctaataaagattaccttcacttttgtccttcctgcttaatttttaaaagcctgttctgctttaaagactttcatttgctgggaccagatttcttggattgctgacacatgtccttctctctgtgcacccacccccaccccatccccactttttttctttaaaaggaaaatatctggtttatatcatgaagaactttaaaagcagtaaggagagagtagaattatatgagtatttaattatatatataatatatatgagtgaaggggttaatctttaattgtataaattctaaaaaaaatttttaaatgacactagataggacataggcctcaaaacaacaaaaagttgaaatatattattttagttttgtttctgtaaacacactatatggggagggtgagggagggaaaggaaaccctaacagattttcagttcttgttaaccatactacaccatcacataaggtacaggattctagagtcactgtgtcaaatgtcagaaaactatttctcaattatttgagcttctctaaaatataatatgggcaagattgatgacatcctgtaaataaaaaaaaacttaatttaaggcaaacttacaaacaaaatgagtttctctaaaattatttaactgcagagaaaacatgccctgtagtgctgtctcttgtgaatttagtttttatttttcataaatttacattctaaccgtgaggtgttgttttagatgtaataataattacactttttctagtttaagacacctaggtggaagtactgctttttcattttctgacgatgcacagggattgatatttgggttggttgagttttagatgtacaaacacactggtcttattttgtatcactgatgatccacagggttggctgctatgtgctgaactttctgttctagactttctgccaagtactttatgcaaaactctggttttagtgaaacaggttttattgtttttaatcagagttgtattataagctgttgttagctatgtaatgctaacagaagagttggtatgtatatacagccatgaaaacaaaccatcaaaacaagcctgtctctgttcgactggttgtttttccctcccattcctttagcctcagttcattttgtttactgccaaaggcctgagatggtgtaattttcttttctaggaacttggcattagaattcctcgaccactaggacagggaccaagcagattcatcccagaaaaggaggtacgttgtttgtgaaagtacatagtgaactgtatgcttttaaggaagagctttcatgacccacatgttggcatctgaagaactgttggtcaacaacatgttttagtcagagttggttgcagttaatcattctttggcagtgaatctgtgggaataaaaagctgttgtacttgtgttgatttctagtatttcatgatgtgtttttaacacccatatttaatcaagtaaagccaagatttgtttttgaccagtgatacaacatctgcttatatttagatgttgtttaggtgtgcccataacctgagttacttagtcttgactgtctccacaggctgatatcagtgctagattggatctttaattctatatatgtataaaagcatctatgctttattttcataagaagtgtatgctattagttaattttagttctccttaaattgagtgagagtaggcggttttgtaaagaaaggctttagtgtctgtttgcaagctctgcaaatttgataatctaaatctgcttctttatctggattctggccaactctgcaagcagcctatctagatggcctttaatgttcagcctttgttgtttatcccctactatataatatgtaactgtttattcttctgtatctttcaaccagttgagtttaaatttgtaacccctctttcttaagccagatttaatctgcttctaaatgatacttagagtgtagcgcatgtatattttcttcccttaacaccaatttaccatttcagtaaccatggtttttctcatttatacagatcctccaagtggggagtgaagacgcacagatgcatgctttatttgcagattcttttgctgctttgggccgtttggataacattacgttagtgatggttttccacccacaatatttagaaagtttcttaaaaactcagcactatctactgcaaatggatgggccgttacccctacattatcgtcactacattggaataatggtttgtaaacattcagtgaaaaattgtttttgcctatttttattaatctctttaagagacagttaatgctttaaacacagggataaatacttagattatgatatataatatgattcctgttgcacagtctctgtttttcctatttttaaataagtacgctctcaagtataacagaaaaagaagcaagtatttatacattgctgagaaccattcttcattaaataagtagaacacaagttctgtttcattattataaatagttcacattgacataagtggtgcttcctgttcaagatgtaaataatattccattattttatgattggcaccttaattgaagtttcttcttaatctgaagttctgaaagtatatagataaaatgtctaaagttcaaatacttttatcagatattttgtttgttcttggaatatttctaaggttcttacagtatttgaatttttaaaatgtttatataaaaactgcatttctgtagtttacggaaaatttgaaaacatactaataaacttaattagctcttttgcatgttgtaaataaaaaggatatgtagttcaaggttttaatatttataattagaataatctttttgttttaaggctgcggcaagacatcagtgctcctacttagtgaacctgcatgtaaatgatttccttcatgttggtggggaccccaagtggctcaatggtttagagaatgctcctcaaaaactacagaatttaggagaacttaacaaagtgttagcccatagaccttggcttattaccaaagaacacattgaggtaagcagtggggtaatatatcttgggagtcatttcagacttttttagagcagttttaggattacagaaaaatcgcacagaaagtacagagagttcctattttctaccccctgaatctcttcccacagatgcacattttcttctgttacagcatttctgtggtacatttgctgtaattgatatattactagtaactctatagttcacattagggttcagtctttgcattgtatcgttctacacattttgacaaatgcctaatgtcacgcatccattacaatatcatatggaatagttagtaccctaaaaatgccctgggttccacctgttcatccctttccccccctttccccttcccctaaacccctgcaaccactcatctttttattgtttctatatagttttgccttttccagaatgtcatacagctggaatcatacaaaagtatgtagcttttcagactggcttctttcatctagcaacatccatttaaggcttcttcatgctttttcacgacttgatagttcatttctttttatcactgaataattctctattgtatagttatgccatagtttgtttatccattcacctattgaaggacatcttggttactgccagtttggggcaattacggataaagctgctgtaaacattcatgtataggtttttgtttcttgttttttgtcgacaaaagttttcacctcatttggataaataattaggtgtgcgatttgtggataatacggtaagcctacgtttacctttgtaagaaactgtaaaactcttccaaagggcagtatcagtttgcattcccaccagcaatgaagcagcattcctgttgtcccacatcttggccagcattggtgtcagtgttttggatttcagccattctgataagtgtgaagtggcatctcattgttatgcatctttatgttacgttttaaatgccatgttaagctagttctggttctatttattaatagagataatagagtaaaagtagattgatgttctctaaaattgtctaccatgcactataaattcttagagatgcatcttttggtcttatctatttcatagaatagatactattagataattaaagatattatcaagaagatacaagatttgaatatattaatacaatgcctattatatattgtcaagtaaggaaaaattatacaagattacaaaatagataatgaagcagaagtgacacagaattgaatagaagaattatagaagttatatataactttttgatgatttaggaatatttaatcaagttgttcaagccactatcttaaaaattccttgaggaggccttataataaacaaagcacaggcgtttcacacagcagcttctacttttaaacacaaatttattacatttgctttgagattttgaactaacaacacagtaattcattcataatccagcatctgaaatacagcagccacttttaagcaaaatgcattctcttacattttaagtcaatatttcagaaaatcaaaataatagtgaatgtcttaacagattatgttaagttctatttgtgaatgcatattcataaaaattagcaaattctgggttctacatgtttcaaatgataattttatgctaggctttgtatgatgactcatgttttcaataaattaaatactaaaatgaactgtatacttttaccacaccccagtacaaaaatatattctttttttttttccccctaagggacttttaaaagctgaagagcacagctggtcccttgcggaattggtacatgcagtagttttactcacacactatcattctcttgcctcattcacattcggctgtggaatcagtccagaaattcattgtgatggtggccacacattcagacctccttctgttagcaactactgcatctgtgacattacaaatggcaatcacagtgtggatgagatgccggtcaactcagcagaaaatgtttctgtaagtattatttgtcatgagattgtcataaaactaatcacaataattgctgttatattatttcttcagttggcttcttagaaaaacccaccctgttaagactgtggagatattgggcccctatatctattcattcagtagggttttattgactgcctcacatgctcatcactagtctaggtgatatacaacattttacaaaagtgatgtacaaaactctaagaccctgtaggagtttacatttagataattttaggatcaggagccaacagcatgtgtcccgtcaggaccaaataatattgattggctactgcagtgacatgagggaaggctgaaaatagtgtggcctggtggtggagactttttgtgccaatcacattcttctcttttgcacaaaataaacagtctggcttcttaattttttatatttcagaagatttaatcaactttgatctagaaatttctctcttcagaattctttttcatgtttaactttgcaccaatatagaaggtgatatcaggtgaatgtaaatgtgttaaaatgctttcacctctattccttctgttcctggcttttatatattcttagttttgttactcctttgaaacagagcaagttcagttttctataagcaaattttaattcctgtatatgatgaatcaaaatctccttctgcattcttttgttgtagtgaaaaagcaagggtttattttatgcttcaaaaataaattttagaagcagtaccacagccatctgaatgctttacatgcattttctgagttatattatccctttgaaatagatttgacaggttgaattgcctttaatttatatatttgacttcgggcaagttactgaatctcagttcttttgtatctaaataaaagtaaaacacaaagttattgtgaggtttaaatgaaatgtctctaaagaagtaaaatgccaagtacagcacttagcatttgtcaggtgctaaataagaggtagcatttacatatggtgaaattagcacaagaaagaataattttcccaaggttgatcataggactgccaaagaccatcagtttcaccctcctttgagctgcctagattcatgttataggcctgcatatggccactgattatttttcaaagcttggcagtcagaagaggatccaagagagtattcagttgctagaatgctaggagatggattcttctccttgctaccaataatttagtacaaggctaaagaaaaaagtacttgattgtttctagttctccttctattaaaagaatgaatagtgaaagaagataatttttatttctctaataagcttcctattcccaggtaagttggatacttttagaaggtttatggcctaccctgatgacactttgacagtgagctgatatggcttgttctttaggtacatatccagtatctgactcagctcttcagatacaaatggtaacaaacaagaattttccctccctcccaaccctggaaactacttattcatttctttactctctccatagttgtcttttccagaatgttatatagttggaatcatacagtacgtagccttttcagattggcttctttcacttagtaatatacatttaaatttcttccatgtctgttcatggcttgatacctaatttctttttagcactgaataatttttcattttctggatgtagcaacatttctttattccagtagctactgaagaacacattggttgcttctaagtgttggtgtattattctgttctcatgctgctaataaagacatacccaagactgggtaatttataaagggaaagaaaaaagagttttcttacacaattttaacattttaatattaaaatgaaatgccattttttttttaatcccaactttagcagatcagtgaaggaacaaagaaacctactttgtttcctttccctcttatttcaatataatttatcaagaattacctttcctaagaatacttaaaatttgggctctttaagaggagaataggtaaacaaaataaattagtgacagataatgtgagttgacagagatcttttttaaactttgagtcatcctgtcatgaaacctaatccttttcagctattttttatttggttactgactctatgtcaggaataactggggaaaatgcatgcatgcaccacaagaatcttcagtatcgtcatagaaacacttcccatcatgaaagtcttagagaaagggcttaatactgggcatttcagtataactgtttggatcaaaagaaaatgtaaagcacaagtgatatagattgtctcttaatatagaattatcctgagagtcattctccagcaagtatttcttgaatatctactatgtaccaggtactatgctaggcttgggatatatacaagtaaaccaaacagatttcctacctttatgaaggtttggtctgggaagggagcctgcattaaatcaatatcatgcgagtaacaattataaattatgattggtcctctgaaggaaagaggagagggttgtgttagaataattggagcttgtggggtaaatgacagtgtttacaaggatgtaagctgctacctgaaggatcaatgggtggaagccaggaagaatggaagatagaggtcttaaaagcattcctggcaaaataaatttataaggggggaaacattaattttgtatgtatacattgagatttgagattaagacttttttttctctttttgagacaaagtctctctctgttgtccaggctggaatacagtggcacaatcacagctcactgcagccttgaactcctcctgggctcaagtgattctcctgccttggtctcccaaaatgctgggattacaggcatgagccactagcccaacccagacttcttaatatattcattttataagaaaggtataaattgcatagatttgatctagcttttgtagcaagaatgcagcagggtatagaagtataaccagtttgactagtgcaaaaccacttggccagtcctttgtcagccccattactctatgtgtgacactgctctagtcatcccagcaagtgacagctgccagatccatttgcagaggtcaggtggccaactccagccatgtagacatctttcatgtttaattggtaaattgtagaaataaagctaattattaaagatgatagacacattgacaatatgtatgcccagtgtacacagttgatgcaaaatcacttatactttgtgtatcttatttatttaaagattaagcaagtagaagttatcttacgcagttctgctttaaattgacaagtagtttaaaacagcataaatggtaatgacattattgctaattttataaggtaaaagcattagaatgtgttcttaaaatcatttttttccttatattttaaaatctgcatgtctgtattcctaataggccaaagtagttttttattcattcatgtacattaaaattataggaatattttccctatattctactaagatataaattctggccaggtgcagtggctcacgcctgtaatcccagcactttggaaggccgaggtggacagatcacaaggtcaggagatcgagaccattcctggctaacacggtgaaaccccgtctctactaaaaaacacaaaaaattagccgggcatggtggcaggcacctgtagtcccagctactcgggaggccgaggcaggagaatggcgtgaacctgggaggtggaccttgcagtgagccgagatcgcgccactgcactgcagcctgggcaacagagcaagactctgtctcaaaaaaaaaaaaaaaaaaaaaagatataaattcttatgagacagacttaaaagataattcatatatattctatgtctgccacatgtaacattaattgtattttttcttcaggtaagtgattctttctttgaggttgaagccctcatggaaaagatgaggcagttacaggaatgtcgagatgaagaagaggcaagtcaggaagagatggcttcacgttttgaaatagaaaaaagagagagtatgtttgtcttctcttcaggtaagaacaaccattatatagtcaatataattattgcaaactcaactttttatttagagaatttaaataacttttaaagcatcaatctaaatatgtccttccttttagagagactattgcataggtattcctatttacaaataatttttaaagcaagcaactaagaaaaggtcataagtgaaaacatcctagactaagggggaggacatttaatttggattctggcactaaaattacttctaataagctttgtgaacttggcttagtcacttaacatatgagtgccctcttttttctctttttttttttttttttttttttaagaaacagggtcttgctttgttgccaggctgaagtgcagtggcgtgattgtagctcactgtaacctgagactcttaggctcaagcgatcatcctgcctcagcttcctgagtagctaggactacagacacatgccaccatgcctgcttaattttttaattttttttgtagagatggggtcttgctatattgcccacgcttctcttccttaatatgaggaaatagtcccaagattgcttctagagttaaaattctgtgatttttttgggcacggcagtttgtacctgtagtaccggctactcaagaagctgaggtggaaggatcaccttgaagccaggcattccagactagttggggcaacatagcaagactcctgtctctaaaaaaacaacaacaaaaattatatgatttgtgaaaaggagatatttattaaattaccaacaacctaaatcctctatgtttaacctttatctatatgcaggctacaggagataatatataaaccaggtaatttaaaggagaaaaagtttataaagtgtctccagatgtattttgacaatataatagagtgggagaaagagcaccgagtttcttaatagcaaagaaacaatcaaatttgtttaaatggaggttggatgttcacttttttttcttccaggaaaaatttttgtttccatgcctaaagatgtagagttgtcatctaatgatacacttacatgaaactataatctcatcaactcctaaacatgatgatagtccagaaagtcttagtcacagtgcaggcagcactgtaaaaatgttaacccatgggatttctttctttgatcatgttacatattatatgtcattaatattcaacaaaaataatctaagtgctaaattttggagcatagctgatttttgtagttatcttaaaaattatccaaaagtatgttcatactttgaataagtcgaacctaatacatataaattggaatgggaggagagagaaaggatctatgaaagaggcaataaaaggcatagagaattcaactatgagttttcattttataacagaaaatctccttttactacattctgtttactagcaagtaaactactttgtataattgtaagactactttggttgatattggtcactcagtatcagagaaagagttatgccatttttactcctttgggtaaaatcaattttaactagcatcctatttttaaaaacctttcaatggccttttttcccagatgatgaagaagttacaccagcaagagctgtatctcgtcattttgaggatactagttatggctataaagatttctctagacatgggatgcatgttccaacatttcgtgtccaggtaaaattgcaacttgtatgcacatgattgactagaaatatctcagtctgacttaaaatacaaaacagccacttagatttgagaactatgctaagtgctttgcaggcagtatctcgtcttgtttcagaataaaaggtgaaagactgtttctaattcatccatggaatcatactgtagtttcaatgtatgtatatcttaaaaattttattgtgtaaatatttaaatatgtaagtatttaattcagatgagttgatactcccagcgttcccaaatattgttaggggccagtgttaaataataactattttaccagaattatgaaaatatttgagaaccataagattttgtttctttgctcaaaaaactaaggggcctggcacaatggctcccgcctgtgatcccagcaccttgggaggctgaggcaggtggattgcctgagccgaggcattccacgaccagcctggccaacaaggggaaaccctgtctccacaaaaaaaataaaaataaaaaataaaataaaattagccaggtgtggtggcatgtacctgtggtcccatctactcaggaggctgaggtgggaagatcacttgagcctggaaggttgaggctgcggtgagttgtgatggagccactgcactccagcctgggtgacagagtgggatcctgtctcaaaaaataataaataagctaaggggcaaaatttaggcacaaggaagagttatagaataattatgcaatagattagaaattgaagacatcatgtgggctggaaattttttatggagggacattaggatttgaagaatttggatggtgaaaagggtattgtaagtagaggagactagacaataattaagcttaggttgagggatagagtgaaggaaggaattataaagagattggttggctgctgagagcttcaagctaaagattcctacttctgattagtggtgtatgtttaaaattggttaggtgtgccttaaatgtcaaagtagtttacattagattatgtggggtttgtaggctttgaccagcgtgatggcatactatcaaagaggtgtttttaggaaagcaacaaagaagtaggggcttattaagttttgtttcaggtggaaagaaaggaggcaaggagatttaatataggaaaactaattaggagactcagttaatagggctaaaaggcagaagtgcaggtaggagaaggaatgggtgatagatgtgtttaattaaaaattcacaaaatttggccagatctggtggctcccacgtgtaatcccagcactttgagagaccaagatgggaaaatcactgaggccaagcattcaagactagcatgggcagcaaaacaagaccctatctctacaaataattttaaaagtagccaagcaaggtggcctgtgcctatagttccagttactcaggaggctgaggcagggaggatcgcttgagcccagcagttggagactgcagtgagctgtgatcataccattgtactctagcctggacaacatagtgagaccttgtctcttaaaacacacacacacacacacacacacactcataatttgaagaccacttgaatggctgcagcaatggaaaaggagaggggactcccaagctggtcacatctggggggctgagtggagagagagtgaaagacataaaggccaatgtgtaaggggaagagactattagtttttttttgttgttgtttttttttgagatgagactattagtttttaaactcactgagttataaaacacaaccttttgcatgttgcagtatgggaattgaaaaaaagattggagtgtaagtgaagctgggagttagggataaaagccagttggattgtcagccaaatgacaatgatttttaccatgctacagagctatagatatagaactgtacttgaccacatttattcacatttgttctattccctgtatttaggactattgctgggaagatcatggttattctttggtaaatcgcctttatccagatgtgggacagttgattgatgaaaaatttcacattgcttacaatcttacttataatacaatggcaatgcacaaagatgttgatacctcaatgcttagacgggcaatttggaactatattcactgcatgtttggaataaggttagtcttctttctgtgtttataaagagatgttttcctctgggccaaattattcaagtgcttggagcgcacatgcacatagacacacacataatcaaaacccatcccctccccaataacttatttttatgctatttatgcttcaaagaaccactttattgcagcttagttttttcttctctttcctagctaggcaggagggagagttagggaccttgacaagaattgaatgacagctgcctccaggaaagggaggacaagcaagctggtcctagaacaaagtttgtaactgaacacctttagtatcttttctcttcatataatctatctcttgatacacttatgtttctacctccttggaaatcagtacccttatattgcccctctggctgttcttaggctccttctgaggagtacttgctctcataatacgtaatcaaaatgcaaaactttcatgtccttgctgttaggttttcagccatgttactatgttacattgaaaatgcagtcattgtataccaccttctcacacatgcacacaaactctgagctacagtgcttactagttaactatttttgctgtaaaatcaggctttctattatcagagactctggtcaaaacctacaaaccctatttaatctactctaaacggatctggcatttgaagtacagctgaccaactttaaactaatttcccactaatcagtagccagactattgactttagcctcctcaatggtggtagaaccagctttgcaagacctttgtcccctttccactgaaaactcaataggagacttcagtgcctatgtgattggaaatccattacccagtggagcaacgcacacaactggtgcatgcagccatcttggcttaaagcaggataggctctcctaagtatagaccatccttctcctcgcagcccctgccttttttctcatttgaccccagaaactcctagaaacatgagtaaagtaattctaattatttttattttatttatttatacaagtaaatttctctatatagagagatatctatctctctctatctctctctatatatagatatctctagatctagagatctagatctagagatatctctatctctatagatatctctctatatatatatagatatctctagatctagagatatatatacagatatttctatatctctagatatagagatgtatctagatctagatatatatctctagatctagagatatctatctatatatagagagagagaaagtactagtaccaataacaaatgtaattaatttgtttcttaatttcgataatactcaaaatctgttttcagaatttgttcagccaggcgcggtggctcacgcccataatcccagcactttgggaagccaaggcgggcagatcacttgaggtcaggagttttagactagcctggccaatatggtgataccctgtctctactaaaaatacaaaaattggctgggcatggtggcacacacctgtaatcctagcttctcgggaggctgaggtgagagaatcgcttgaacccaggaagcagaggttgcaataagccaagatagcaccactgcactccagcctgggcgacagggcaagactccgtctcaataatagtttgttcctcagtgtggctacgtgttcatgattgcagatatacactattgcttggtacccagtgctatgttaatattgtcagctttcaggaatgatttacttgggtagtagaaaaaatgttatgttagtctccctaagtactctgtttcttatccctttatactcacttattcatctgcagttataaagctctatcatttttggggacagctgcctacacaaagagagaaaaaatacagtattaactattgatgtgtatacttttgtaagatgaaaacaggttatacactgaaaatatcataattctcattatgtctttcaacagatatgatgattatgactatggtgaaattaaccagctattggatcgtagctttaaagtttatatcaaaactgttgtttgcactcctgaaaaggttaccaaaagaatgtatgatagcttctggaggcagttcaagcactctgagaaggtatgtgcctattgtggcttatttactttgtaacttagcaatgattcgtagtctccttcacctaacctaatggtgctgaaaccctttccatcacccctaccaacccaaagaaaaacattccaggacagctgtctcaggtaccccttcagaagggaacctgattatgttgatagagtaaaagaataaagacagggaacacaggtgggctggcccgtcttcagaagtgctggcatggctgtcagcacatagaagactgttttataaaagctgtgtataggtagaagtgtctgttctctttgaaacatctttatagaaattactgaataatgatttggcaggggaagttgctattctgataaaacagtgtctagattttctgacatgtaacaaacctccaagaaacatgataaaatataaatgaaagctcaatctatccaaaaagaatattaggccaggtatggtggctcacacctgtaatcccagcacttggggaggccaaggcaggctgatcacttaagatcaggagttcaagaccagactgtccaacatggtgatactaaaaataccaaaaaattagttggacatagtggcatgcacctgtattcccagctacatgggaagctgaggcatgagaatcgcttgaacccaggaggtggaggttgtagtgagccaagatcgtgccactgcacccgagcctgggaaagagtgaaagtgtgcatcaaaaaaaaaaaaaaaagatagctgctgttttgagaaatttataatctgttcaacaaacccaaggctaagttatgctgtactacataggaagtgtaggaagtgtacttattttatgtgttcattagattcactgaaaaactgattgtgaatgcttgtaacccttccttatatgatgttgtattttatattcaggttcatgttaatctgcttcttatagaagctaggatgcaagcagaactcctttatgctctgagagccattacccgctatatgacctgatgcctttccttcattaaagatgattctggaatgatcagcagatatagtctacaagggggaaggtactaagccccaggaccaatggtagacaaaataattcagaaatccattgtgccatgattcctttagtttctgctatttttctgtggaaaaccactgctggcacaagcagtgactgtttggcagcttcaagtttagagctgtgaagacaggctgccattcacagtattttgctttttgacagtacaagatgctgtgtaactgttttaatacagcaaatagtaactctccaaatcctgttgcttttatgttaaataagataacaagaattggagcatgcaaagaatgggacttggataatgacttaagctttatatgtaaagaattttagaagatcttggtgctgctattcctgctggaggaatgaatagatggctgtttcagttaagctattagtaataaaagtgaacattgctactatctgagcctacatacataacttgtgtgatttcaaattaaacttgcattatgtgttaattttcttgcatctaaaaaagcatagaattcctactcacacagctcagcaacaaccattttgatggtaacagttaatttctttcattagttttttaaattcagggttctggatattaaattaaaatggcattcttaaagattttcttcaaaaagcaatcctaaatgaaagtgtgtaaattataagaagctggcgatcttttgatatgctgtttcacaggatcctgacactggagggcagctgtcttgtgcattacttgtgtttccagcaccaaagttgtgggacatgttgctgtagactgctgcgcagtcctgggtgcattcagtctctctgcctctgcctgcctcctggtccccactttaaaggctgtgcagctccttaaataataaagctggaaaatatttttagtcgggttatcaaatttgatttacaaaaacgctaactttgtttgaaatgcaaacaggtttgaaaatatgtattaagtactttgtattctggaagcgtgaattgcttttgaagtctgtcagtattactggtatttttaaataaagaagaatttttctccaatttta

SEQ ID NO: 321 - DNA, 28749 bp, Homo sapiens
ctgcagcctgcgcgacgcggcgggaggctacccgggggcgatgggaaggcgggcgcagtcgacccaagggtggagaagagggaaggcgaaggacgcgcgttcccgggctcgtgaccgccagcggcccggggaacccgctcccagacagactcggagagatggcaggcggaagacaccggcgcgtcgtgggcaccctccacctgctgctgctggtggccgccctgccctgggcatccaggggggtcagtccgagtgcctcagcctggccagaggagaaggtgaggggctgtttctgcgtagttgtacttgagcggctctggtccgatgcgaggacccctggccgggtcagccctacctaggcagagcgggaggcggggcagggccacggtccccagcccaggcaccggcgccccacccggcgcccggaggagtcggggctctgcatactcgccggggtgcctcggccagtccggggctgttctggagacgccaggggggctgggtgatgtcactggcctctcctgggctgcggtctgatgggggtgctgataggcacaggaaatgtgtctcgccggcggctgctgagccgggaggcgagggcgcatcgcggcgccaccccccactcgggaccctggagggcaacggggccggcgctccggggccgctagggtgcggggtgcgcctgggggtgtgcccacagcccccccgctgcttcatccaaggatgctgctggggcgctgaagtgtccctacagtctcaggacggatgtgtgttgtttgttttagatttttaaaaggagcaactcggcaggaaggacctttactggagacctgcttacttcaaaagcctttttcctccacttaaaagagggtacctgctattttcagagaaaatggatctagttgtaggtagaaatcgcatataaggaacttaggataaaagtgatttgcaagttccctctgtaagaagtgtatgggttcggccgggcggggtggctcacgcctgtaatcccagcactttgggaggccgaggcgggtggatcacgaggtcaggagatcgagaccatcagggctaacatggtgaaaccctgtctctactaaaaaatacaaaaaatcagccgggcgtggtggcacgcacctgtaatcccagctactcgggaggctgaggcaggagaatggcgtgaacccggggggcggagcttgcagtaagccgagatcgcgccactgcgctccaacctgggcgacacagcgagactccgtctcaaaaaaaaaaaaaaaaaaaagaagtatatgggttcacaattacatgggttcacaattacttccttttcttgtgtaacagttttgaaatcatgaaattgctaagggattgtgcaaatattaatgatgtcagcataaaatagtatgttatagagatattaagaaaagcagcaaagtgaagcgatataaactttggcagtgttattgagcagaccttttacacacttagagtatgcctgtatttactcaaatgtttgaaatacagggcacgctggtaaatgcccactcccacccagctacatgcatatatatatgaatagcccatttcaattcttcggatctaatgtaatcaccactcaggggtcacagcaggccccacttacacatggagaccacaggccacagggaacctggtggtagtgagggaagtctgtaacataagaataactttattttaaggaaaacaacttcccatgggggcccatgaagaagaacgtggaatgacacacaaaaaatcctctccttctcttcactgagaatacccttctggtcagaaattgggaagagaacattacagactggaatatggagccacaccaaatgtatctttgtgatacatctaaatggaagggaataaatgagatggaaactgaacaaaccactctgaaaagatcatttgtaggtgtgtgtaggcagggggtatttatgggtgggaaaaggtgctgtgattcttaaaatattttaaaccaatgagaatttaacttttgagaaacgtcttttaaagcatgaatcccttttatatttattttaagaagcttctgatcactgttccattgagaaactgaatgttttcaaatcattaaaagcaaatgacaatcagccatcacatttcccagtttctagcttcctccccttattctgtagaccttcataaagtcttgcagcctgggtgatgaatcggtccacactaaaatatgtgccttcctactttttatggtgttcgactattttaatcatatgatgtatgtctttggtacactggtctgctaacaggtgaggtgtggtaaagaaagcattgattttgaaatccatttccttcgttttgaaataaagatgtttctctttcagtggctttgaatatgtaaaagcagatcaactgtagtttatggtggcattcagaggccatgatttgattatgtatttgaaacctggaaacaatttttccatagtaacaatattataaattgttaaactcccaggtgggcacacacctgtgtatttagaggcattggcatctgggtatggggtgttttatatatatatatatatataacatatatatatataacatatatatataacatatatatataacatatatataacatatatatataacatatatatatatataacatatatatatatacatccacctcacttgaacttcacagcaagccccatgaggaaggtacattcatcctcaatttatggttgaggaaacttgacaactattgcactagtgaactgaagagctagggtttggcttaagccctgatctctcctttcttcttctgtgcttttctaatggtagatgagtcctggctgatgtacccggaacagtgcccaggtagtgaaaaagtgtggggctagcagggaagttggagggccagatgaagagcttactctctctttctgggtcagggtggaccctaaatggcattctaaaacaggtagtttggttttggtaccttctcttctgacaccccctattttctcctttccttgatctccttcatgcagcttaaaggtcatcattagtctgggtgctaatccatattccagagttacttcttctgaatcttccccaggccttttggtcaccagtcttattcctttagtacaggcccattcctttagtacaacattgtcaactagctattaaacagaatctcattaaatcattcttccttaggtgcgaatgactgatggcttttgagggctttatatgctctttaaaaatattagtttcgataaactaaaaagtctgccttctattgaagtcttctaattataaagttgacatgtgctcattttagaaaacttggaaaatacagaaaaatacactaaaaagaaaactaatgtcacccataaccccactattcagagataatggctattaaccattttggtgtttttatttctatctctctctctctgcgcgcgcacgcgtgtgtgtgtgtgtgtgtgtgtgtgttattgttgttgttgcattctaatggaagcaacgacggagactctcaggcagtgacgtggaagttagttgggggctgggtgttggtagggacagaaagacaaaatgtcattttggagccttaccatctagttggtaagtatcatgagatccattttacagatatggactctttcctagtcacagctaataagcgagggagctgagatttcaccctaagctgttgtggttaaagcccgcacggctctgcttttaagtagagggctgcttgcattttagaaaagacagatgttgtcttgttcagttcctaactattcccccactgaattttttatatcagtggcatccgacacacagaaggagttcagtaactgctgattgagctgactttgcagacagacagaggtgttaatctgagaattgcccgggagacattcatatagaatagaaactggacttgcattggctgcatttctgtaatgatctccctttaattcagtcttttggaacctcaaaaccctttgcaagctgggccaactctatcaattatgtaattaaaaccctctttaaaaccacatgattagcctagaagagatgcttcaggatatctggttcacacttttggctgaaagattcttgcactcagagcagacttattgtcctttctgtctggatgaaaagacaaggcaggggctgtaacagagcctcattcctctgagaacacctgcaccaatagaaaattgtctaagtgtcttttaactgagataaacctacaataaattggggtttgcatttaccattgggctcaactttgtttttgcctgagttactttccccctgctgagctcgctctttctttccagctttttcctcttactcattcatctcatctccacctaaatttgtatatctattgagttctgagaataagacccctcaaacattgaatgcatgctatttaggttgggaaagtcaaatgcttttccacacagggctttaatgaatagaaggcttaagtagttgactgagtgtagttggttgtttcctcttctctgtccttcagttactgggaagcttttagctctgggattttacaggggcatctttgcccccagaggggcaaggagagtcagggctctttactgaagtatgttaattaaatggttgagcccaggaggttgaggagcaaacacatgtaagtctctagattcataagcatcaataggcctggcctgtctgctggatttaccctttagtcatccattaagcattttttggtgctatttgccaattaggtttcatctgcagtatctcttgtagttaaagatgcttgggggagggggcatttattttgttcctgttttttcttaaatgtcttaagagctctttcaagcctctagaaaccagccatttaaacacaagtgatttcgtttcactctggacatggagtgaaagcttctatccacagtgaccagatgggctttgggatagagtattggacagtaagcagacaaggagccactggtaaacagcttttgacacaacagttttggttgtcatagtgactgcttgggtcaacccagctcttcatcgtcagaagcatcgaatgtcagaaattcaaaaagagcaaagcccaataacattgaaccacagcacttcctggccattgcagcaggtagccacctgtctcttctgtctttatgcttgcttgtgcattcagctgatttattatttacagtggcagaaaaatgcccatgttactttattattatataaatacagtcttagcaaagataattttagaaagatagttcatctgttgattgcttttttgattaatttccccaatatttatcaaatgctcaagatgaaccaggccctgtgtggcctgtgtgggagagagaggtaaacaacagagagagagggagttccagcccttatggagctgatgtcttgtatgaaagacagacattaaacaagtaaacacacaaagaagtggcctccaagctgcaagctgaagtgagcaggagttagccaggtgaagaggaggggaaacagcttgtaaggcagaaagcaccgcagatgccaaagcctcatgggggcagaacctcagagcatttggggcctggccaaatgccagagtgaccgaagcatggtgagcaagggtgaggggggagaccagacaggcttctgttggcagggttgagtaataattaaccatggaagtcttctgacctcttgcctccatattcttcttatcccttcgcacatttctattgctttgtctttcagcttcagctttcttttccaactgttgtttgggagctggcatgaggacttagatcctggaggtaccaagggatttaaagcctgcactgacaagtttatcaaggaaatatatttaaaaatgtcctaccaataaacaaagacaaatcttctgatgttcaggcacagcaccaatattcaggaataaactggaagtgcataaatgagacagtgaggcagagtaaaactagcatgggattggaaatccccagacagcggatctttttgtggatttacctgtaactctccttcaacctcaggaagtcagctggtttctatgaatctcagtttccactaatataaatgaaggaggttggagactagagcatctctaagtggcttttccaactttaaaattcattctatggctctttagtgtttgatagaaggaaatagtaactaacacattgaatatttactatggcagtttacatatgttagttcacttaattctatttaccctaggattcaggtattactacctctgttttacagatgaggaaattgagccttaatgaggtttagtaacctggaaagatttacagctagtaggtggtggggtgctgagttgagaggctgagttgagagggtctgtctgatcctatagcccatgctctttgcatggtaagtactggaaagtaaacagccatctcggagtatagatgagtgtaaataattaggcaataagcattctttgaagtccagtttcacaccagtcccatggagtcgatcacatggaatgaaaatagttgcatgactatttaagcgtatccagctaacactggtcctgaaaggaactataaaataggcctctcctaatttctgttttgccttccaaataattcaatattcttatgtcatcctcatccttccccttagggaagaagtcatctgatcaattgttctcttcctgttgaggaggagtaacacattccattattaggtgcctgataaacatgtaatgaatgaatggttcatcattaccagtatcataagaatatacagtatgtgtgaagtcatccaaaatacaaatttgaatgttatgtgaactttaatgcaatttaaaaataattttaattgaagttaaaaagtctactatttagttggctatagattcaccaagctcaggctgaaaggaattgcaacaatcatctgagttggcactgtctaatagaaataatgactcagggctgggtgcggtggctcatgcctgtaatcccagcactttgggaggccgaggtgggtggatcacctgaggttgggagtttgagaccagcctgaccaatatgatgaaaccccgtctctactaaaaatacaaaaattagctgggcatggtggcatgcacctgtaatcccagctactcgggaggctgagacaggagaattgcttgaacccgggaggcagaggttgcagtgagccaagatcatgccattgtactccagcctgggcaacaagagtgaaactccatctaaaataataataataaaaaagaaataatgactcagctactcaggagactgaggtgggaggattgcttgagcccgggaggtggaggttgcagtgagccagattgcaccactgcactccagcctgggtgacagagagaaaccccaacttcaaaaaaaaaaaaaagattatgaaagaaacatatgtaattttaatttttctagtagctacattaaaaaagtgaaaaaggggtaaaattaattttaataatatacttcatttaacctaatatgtcaaaaaattaccatttcaacatgtaatcattataaaattttgaattaggcttgctattaaaatcctattaaaattcgaggaccccttaatttgtggctcatctataaagtcttccctgactactctccctctatactgtgtaagatttacttaggctaacagttgggttttttaattatttttaaaatttttactgagacagggtctccttctgttgcccagctggagggctcagtaacacagctcactgcaaccttgacctcctgggctcaagcaatcctcccacctcagcctcctaagtagctagaacaacgggcatgcaccaatgcgtcaccacgcccatctaattttttcattttttgtagagataaggtctcattatgttgccagggctggtctcaaattcctgggctcaagcagtcctcttgcctcagcctcccaaagtgctgggattacaggcttgagccaccgtgcccagccctaacagcccaattttaaagttgagtagtttaatttacctcatttgacataaagttctcccttattttgaagttttaagcaattaattgaaaacatgtcagagtcttaaacatgttatgaaaggatagctagttaaatgatttcattcaatcctcagaattaccaccagccagccattttgaattcatcggctcttcggcaaattgcagaaggcaccagtatctctgaaatgtggcaaaatgacttacagccattgctgatagagcgatacccgggatcccctggaagctatgctgctcgtcaggtgagaacatgggacacaaacctcaagcttgtgtgaatactgtgctttctcatgagggataatgttatggctgaagttctgaggtgtctaatattcagatctgtcatctcctcattcaccaaatagtcaaccaagaaaaatcaaatgactgagagtacatgtctgttctgaattaagtggtacatgttaatgtcaatagtttatgtgtgaaatctctatttggggtacaacattacacagtccttcactcttgaccattcaatagcacaccccgaggctcccaattaagttttcttgaatcctaaacaatgaacagcaacaggcttagggagtccttgcttgaaggttctaagtcaagagtatcattgtactgtcaggccatcactcgccttagggaaattgtattttccctggagggagagttaaggctggtgataagctagccgcatttctccagggcagtgcttctcaaacttctgactctgacacaaagtaaaaaaaaaatgaattttacattttatacacacaaacgtactggcatatttaactgaaacaaaacttccacgaaaaatattcttacagcattttactgcaatatggtcagttctattttattggttcttaaaaaatgctggtcataacccactaaactgatttcaagacccattgattttaccactgttgtggagggtagaacaagctgggccagaccttgaatgcctctttgcctccctgatgtcagtcttcctaagcaatctgaaacctcacctctgaatatctgtttttttcaaactagccccattttaaggggccgcttgggaaggaatgggactggcccttcacatcctcttctgaaactcctcaggcaaaagaccttggcacccactgctgtgcctagattgagaactgcaaggcgcaggtgcccagctcttgagctcttcctttcgatttcagagtctcgctctgtcacccaggctggagtgcagtggcgcgatctcggttccctgcaacctccacctcctgggttcacactattctcctgcctcagcctcccaagtagctgggactacaggcgcacgccaccatgcccggctaatttttgtatttttagtagagacagggtttcaccacgttggccaggatggtctcttatctcctgacctcgtgatccgcccgcctcggcctcccgaagtgctgggattacaggcgtgagccaccgcgtccggctgagctcttcctttctgcccagtgtacagcctctgcctctcaggctagcctagatatccatatgtctgtgtccccattagccttttgtcttccatctgaatagctctggcttctcccaaggaattagacggtagacaccctgcaggcaccttagttctgtctaacctttaggcagagtgaagaataatagcaatgatggctgactttcactgagcagtttttctgggtcaggcactttactgagttctttgcatagatcatctcattcagccttcagaacagtgtgtggatgctattattatctcaatattaggaatttaaaaagatctgaggttgaggtatatgaattaacttgctcaaggttatacttgtaccattgttgaggccagaatccacttgagatctctatcctgtcactggagagctgggaggaatcagctctgcttcgtgcactcaaatgtctccagctctcgatcttctcaagcccaagttggagagtgaggcacataccattcactttaacaacattccctgggccttatctctcaagcattttcttaaaagaaggccagggcatttaattggcattttccaaaagcctcagttccttgttagaaaaaaatctaggtctgtgatgcttactcttcccattcaactcaaccttttttttttcccataccatttgcccagagcgctgtatataaccagaaatgatatgcatacttcaggcctgaggttctttgcctgcaggctctggaaatccatgaacacaataaactttgctagttgatctttagcttcaacagaatacagtatataggataaataatatacatagatattgttgtagttaaaaagatacatattcatttaaaagtgttactgaagtttcagtaacattctccactatcatatgggggtggaggcaaatgagatatttatggacagtattttagaatgtgttgggaactactgctgggctgcctatgcatgggctggctgatggctatgttagatatctcacttagattccattttagaattttttgagaagaaaattaccattaatttttagagacctatcttctaagctgtggaagacaaaggaattctcattttgaaagtgaggtacatgacagagtaattatgagggaactacactaatggccttaatttgactaagattagatcctttcatgtagaactgaattgaaacaaaaatgattgaaccttttttttttctcctgaggcctttttgaacactagatgagatgttttataatttagagtttcaaggttgtaactagagaagatcctcaaatattaaaaaagggtaaacttgatataaaattggtttgtgaattaacttttgtagttaccagtaaagatgtgcattactatgggttctcttttacagaaagagaatattttgggggaaccctgtcccacattatgcgttttcctggtctctgatcaatgaccccaaagctgcctattggattattaggatatttttattttgaggagataagttatttgtaaaacaaataatttgaagataatacatttggggctatttcattgatttataagatagaaataaaaaaattaaaaaattaggatgataaagtctcacaaatgggcaagcaatatcctttgtctaaaagaggcaaactagaaacttcagggggtaaaatcccccacaggtgcacagtgcatctgagccaccgaaactgaatgtcatcaggtacatagatcccaggtgcaccctcagtccagccccctaagaggaggagcccgagggactcatatatggtgcactcaagagtaaagaggtacccgagtcttcaggtggcagatgtccgcatcctgacgacgatgtgtttgcagacttaacacaaatactggaaaatcggcttcctccaagcaaatctggtctactgatgtcattgtttctcagaacctggaaactagaatttatgtttaattaaatgaaacccaggatcattcactagtgttaacctagaataaatccccctaccactctttggaagtagactatcttgtaacagcctctctctcgtgctcatgtcttcatctttgtattttttttctttctctactcagtctccatctatctctgctttatccctatctccatctctctcactttttctctttctccctttttctctcctctccattttaaaacatagatgtatagcaacccaaagtgtgatctatattctaaattgcctttcggcactcctggagggtccagccctttgctgctttggtattggggaaggcagctgctttagagtccctgccacagccacgcactccctgcttacgggtatttgaatgatagtagtggtcgtttggggagttcccctagagacttctggtggggacttgtagactaagtctgaaagccaaaaacaaaacaagggatattggtgaactaattagattatgcagccaatttgatcgtttataaagacgatttatcttagctgctaagataaacaaaaaatagttacactgaacaaaaaagttgcggggctgggtgcggtggctcatgcctgtattcccagcactttgggaggctgaggcaggcagatcacaaggtcaggagatcgagaccatcccggccaacatggtgaaactttgtctctaccaaaaatacaaaaattagctaggcgtggtggcatgtgcctgtggtcccagcttttcgggaggctaaggcaggagaatttgcttgaaccagggagttggaggttgcagtgagccaagattgtgccactgcactccagcctggcgacagagtgagactccgtctcaaaaaaaaaaaaaaaaagttgcttcaggaaaaactcttttgaggatatatgctgattctcttatggattttagtgtcaacaaggtcatcagaaattatgatcaagacctagtaacaagttgagaaataagtttgtgtgtgacttctgagtattgctaacagatatattttttaaaattccaattcattttgtgagcttgcaatctgcaattggtgttgaagaagccattttatggagcattttatcatctggataccagatgttctggagtatatgctttttttttttttaaatgacccattttgtggaattttttttttttttacagtctagggataactcattttcatagtctgcagaaaaactcatgttaggtgcatagtgatttctctctattcaaactattaatgctttgtatcgtatagttttatatattctcattaaatcaattcatatttactgttagaatgaacccatatttactgatagcctactgtgagcaaagcacagtactacaaattgtggagagttatgaatgctgatttcaaaaaaggttataaacatttcttttgatgatgtgataagacagcatgtaaatttgcaatagaaaagttaaggtactgcatgcacaatgctatttaggacaaagtccacccactataaaaagcaaggagtctctagctggggaatcatttgtttagttggcttttgcaggaccgactgtaggatcagtgtcctcccactatttaaattcccctttccttggaagcttcctgccgcagttgttttgagtctcttgcctacgtgtcatgtcgcattagtgagcacaggccacatgggacttggctaggatagaaaatcctgtatttcttaggaggaaaaaaaaaataaaagccctcacattcatttccagttattcatttttcattttaaggtccatcccagatctaaactgtctagatctgaactgttagatctgaaatgttggtttttggttagatgttaattgaaggacaaattgtcagttattttgatgttagtttgtcgtttgactttttataaaaataatttaaggcaatttacaatgatgtatatgatacttgaaaaaaaaaaaaaaaagaaacagcctgggcatggtggttcacacctgtaatgccagctctttgggaggccgaggcggatggatcacttgagcccaggagtttgagaccagccccggcaatatggcaaaactccatctctacaaaaaaccaaaaaaacaaaacaaaaaaacccacaaaagttagtcaggcatggtggcatgtgtctgttattccagctactcaggatgttgaggcaggagaattgcttgaaccgaggaggcggaggttgcagtgagctgagattgcaccattgcacttcagcctgggtgactgagtgaagccctgttaaacaacaaaacaaaacaaaacaaaacaaacaaacaaacaaaaaaccaaggaacataggaaagtgaagccaagataaaatagggatgggaaaaggcaaatgaatcagcaatgaactcacctataacttctcacatcgtgaagtctataatatgttctttaaaaaaatacttctagttcctgaagtgatgctactttctgcacctgttgctttcttctgtcagtcactgtgttgccttataaggctcaaggtggccagcagagatggggaaagagattctcttttatatttgccagcatttgcagtgcgtctcaacctgccttgggtgcagagggaaagctgcttgatatgttattatggttcagggttgcttattaattcttacagtgagcggaggtctgaaataacctgaaccaccccctagctatgggagctttctacgttatccttagcaggtgagcatctgtatcttttattagtgttcattacatgtaaagcatttgctggacttggacacatgttatgcacttgggacagaaagagctaccatttgcagttcttgtccttgaagagcttagagatagagacctgtaggttgctggtttacttaattttttaaatatgcctttgtagcctcctagaaatattaaaagtgtacgttactattaccgaactgcatctctgtctcctgacttgtagacatgtccataatatattgttaaaggagaaaagcaaggggagagtaatataaaaagtaggattcttttcctacaaaaacatatgcccctctgccaaatatatgtgtttgtatgctactgtaggtttgcataagcaaggagaagatatgtcgaaagatctgcatcaaactattaacactggttaatattaacaattggttgagattgattagtaaggggaagtttaagggagaggcaagaggattagcttctcctttaaacaggacaaatgctattaattacaataacaatacaaagcaattattaattgcaataatattgctatgaattcattaagtgtgtattccaattttaatttgaaaggcactacttaaaatttcagaatcacagttaacaaatgaaagccatttctttagatctaaattttttgtttttttgttttgatcagcacatcatgcagcgaattcagaggcttcaggctgactgggtcttggaaatagacaccttcttgagtcagacaccctatgggtaccggtctttctcaaatatcatcagcaccctcaatcccactgctaaacgacatttggtcctcgcctgccactatgactccaagtatttttcccactggaacaacagagtgtttgtaggagccactgattcagccgtgccatgtgcaatgatgttggaacttgctcgtgccttagacaagaaactcctttccttaaaggtatctgttttctgcttattgattcctaggataaagtacattaacagtaactcagagtgaattctagaatccttggaggaatgagaaggccatttagaaatggagacttttggtacatttttattatgaacattaattgtaagattgcatgattgggaatatcaaccatgggcaataaacctaagatacgtgacaatgcattcattaattggcacctgatttatcagccttgaatgcacattaaattaaatgcaacatttctttgtgaaaaatgaaggaggaagtttgtttcaggtatagtatgagaattgtgttttataatgaactatgtttatttcttcttctttctatggccatgaaacatcacaaccttctgatctgagagatggtggctcttgggttggaggagggagttgcagcaaagtggttctgaagtggagagtgggtaattcagacctatcaagatgaaaagcatgaagcagaaatgcattattgttattatctgtgaatctcagctccattttatgtagcatagcagagcttttgttatgctctcagctcaaaatacttctgggactctcagatgttatttcagtcttggtgttcttaagggtatattggaaaaaagtgctaaactagatgaagatattttgttctgatatcactcataaccaagtaaacacaacaaagcaaaaacaaaaaactttgttctcaggcaacaaatgctttgttccccgctcagagctttatgaagggtccagcctttgatacagtgggggtaaagaagtaaaaagtttatcttgtaatggaagtagtagagatatttggttctatttttgctggatatgctgaaattgaagaaagcaagacttgtttataccctctcagtctccttttcacttcttttttttggtttgttttgttttctgagccttctacaatccctttgtcccatgctttgccctgcttttaactagtttccttccccagcaattggatgaaggagttcaaaagctgatgcaaaagtctaatttttcatatttgcacttctagtataaggacacaaaatgaagtatgacttgaagacattgttctgtgtaatggatgtattttctctgagtgaactcctttgctttttcccatatagctcatatctgcttttggtgaccagaaatattaatagaaaggtctgaatgagttattggattggggtcatcattaaaaaaatttgaatcaacatatatattctcatagtaatcctttctgttagagataaatggtgaggtgggggattttttttaagaggctgtttttgaatgcagactttgagagtatcagatttattcttccagttatatgttttaactaaattggtattgagaagttaagttcttcagctgtcatggattgggtagacggtggtggaaagtgacctgaaagagtgcttgataagtagactggattattcgcaactcttcatagctccacttctctccagtaataggactgtcattacacatccacatcctttgcctggtaactttgctgtgccctcccactgtagccagttgtacttcctcatcccttcactctggacttcattatttgacttgccttagccaatgggatgttagtagaggtgacacaaacaggggctggaagtgtgcttgtgccattgggcttgctcttccgtgtctttgccataaccatgagaatggcatgccctggctagcctgccagtcccagcagaaggatgagacacctggagcagaaccaaccttgctgactgcacagtgaagcagagctgccccagccaaacccattctagatcagctgctccctagctgaccagcagaggttatgtatcccaagaagatacataatggtattttaagccactgtgttgatggggtgttattctattctattattgcaacattagctaactgatacagccttgaatggggaaggactgcagataacccagactgtgtgaacgctggtaattaggcatttgtagtgttaccatgaagaccttcatacatcaggccagtcagattctcctagctccaaggtactaggctgagttactagtaacgaaggccatggctatttttctgccattcctgaaatgaagcaaaaagagcaggttgcctcatgggactcaggatgaatgtccacaacagtttattgctggctaaatgaatggatattaggcgaacagaatgaaagcaaatcgttgtactgatcattggagtctcccagctgttgaagtttcactgaggtacttgaactgtcaagcctgcaagagataaaaactatttccgtttgcctatgccctgggcatgagcagaatgcctcttgtcccaaccggtcccgttctgccctcttgttctgcgattatgttgtctgatttgaagctagaactttcaaggccctttaaacaactggaagcttagaatgtctctactgaagcaagcaccttacaatttttgccaacgagaaaatctgtttaattatttaatgcttattaaaccctgagtgcatttatattgcacaaacacatcctctgcttaatgctctccaggagttatggaggattcaaatcaaattacactgtcctttcctcatggtataattaaggagcaatatgaaatgattagcgtacaaaattaagttagttttcagatgataaagacaatttttttctcttttgaaatcaccgttaaaacaatcagggaaactccattttttgaagaaagtagagaacatctgtgaataggaaccacaatatgaagacagaagttggatggagaaatggcagatgacatatcagagtggagagaagtcacactgtcctggagagggaagaaatggaagaagccagtggtttccttgatagaatcctaaaaaggctcaggaattagagatgtgataagctgaggaaggcagaggtgaggaaggggctggtgtggagagtgtttctaagtctgtctaaggaatatgtggatgtagagattcccaccccacaccaggcaggtaagtgagtgcccccttgtgcctttgccacagatgagaaaatatttttctggagaaattgaaccagggaggttatggaattgagaatagcaagtatacaggagggtgacagtggggcaccccatggaaatcggggagattaggcgaaagcctacacattgaacagtgagatctatagtttctctcccatcttcagcaccagaaagccatcagataggaaactggaggattcttcttcagaccgtgtgaaccaccccgcagaaaaatcccagatggtgacattcagtaatcctcagtgaaaacactggctgggcaccagattgccttgcagtgaagccaaccaatctgtgtctccaaccagcattttaatatcttattctttaacatgaatgaacacaaaggatgaccagacatttgaggacagactccagcatgaaagaaagggcctggagcagtggctcatgtctgtaatcctagcactttgggaggccgaggtgggaggattgcttgaggccaagagtttgagaccagcctgggcaacatagtgaggctccctctctacaaaaaaaaaaaaaaaaaaaaaattagctggttatggtggtacacacctgtaatcctagctacttgggaggctgaggcaggaggattgcttgagcccaggagttcaaggctgcaatgcactataattgagccactgcactccagcctgggcaacagagtgagaccctgtctcttaaataaataaatacttttttaaaatgtaaaaaaaaaaaaaaaaaaaaatagaaagcaaaacaaatcatacaaatttaaaatgaagtgggaggaaatagagcagaaaatgacttaaaggacactgttctaatattcttacagagataagaggagacattatatctatgaaacaaaaccagaatgctgcaataacagaacaattggtcaataaggaggagcttttggaaattaaaatttctattttcaaaataaataaatcaataaaacagttggatcctaaagtagaagaagtatctttttttagaagaggaatgacaaaaaggagacgattatgacttttggagaataattgtaacaattccagttaggtcatataaaaagtattgggaatgagaatggcactggacttctcaatagaaactttgggagctagaaaacaatgaaattatgccttaaatattttaaataaaaataatttgcaacccagaatcttcagacccagaaaaattaaataggaaaatagaatgaagacattttcagaggtaaatctcaacaattttcactcccatgtactgtatttttgccctagaagttgcttaaagctgtgctccagaaaaatcaagaaagaaatcaaggatgagggagtcatggagttcagctcactgggggtcccatataggagaggcagaaatctgcaggttgatggtgaggggagccccaagataacaaacagataggcagcaggcctagtggtcggtccaggctggagcaggcagcagagggctccggaagggcccattcttaaaaaacaaaaccagacagacatgagaaataaaggtgtgatagtgtctggaacgcttgaccacataatggtgaagacatattaggctcaaagaaaacaaagcaaatgaaagagaggcctgtggtgaggaatggtgggaaacaggtttgcagaggcaggacgaactggattgcgatgtttgtgtacatggaaaaggacagaaagagacagatccccactggtttttggtctgagtaactgcaaggggggttttgccatccatttggttgaagagactgttggtaatacagatttccgggggaacctcaggagatgagttttgacactttgttcgaggtgtctattaacgtctatgtggagatcttcatttggcaactgaaattgtagtctggagatcggcagtgaagtcagggctggagatatattttttggaattgatatttacatgtatgtgtgtgttgtgttgtgtgtgtgtattattataatataatacaatataatataacatataatatgtatatatagagagaccagcctgggcaacatactaaggctccgcctctacaatattattattattattattattttaaaataattatattaaaaattttatatatataacaatacacacacaacacagcacacacacacacacacacaagacaacacacacatacccacacatatatgatttaaagcctcaagaagagatatcaagacagtgagtgagtgtggacagagaagagaagagaaccatggagcaagcccctgaggctctctagtgtgaagagggaagggagatgaagggagccattagtgctaaggtaggaggaatatggtatcttaggaaccaaatgaagcaagtgtagccaggagggagtaattaactgtgttgaatgctgacaataagtcaagagagatgaagactgagagttgaccactggatgtagccatgtagagtcattggtgtcttgacaagagcagtttcagtacacggtggagataaaacccaactgggctaagtttaagaagtgggattggagacagcgtgaatagacaactccttcaaggggttttgctataaatgggattacaaaattgggcagtagatggtggagatagtgaggtcaaatattttaagatgagaaaagcaacagcatgtttgttggccgatgggaattatccagcagagatagaaaaattgatgatgtaggagagaaatggtatttgctagagcaatgtccttgagcagatgagagaggataggattttgtgcataagcagggagactggcatctgatatgagcatgacagaaagaaatcaaggtcatcggttgggaatgaagatgggtgaggtggcagggagaggaggaatgtgaaatcctagaagagtgccagagtgactgaactaagaaaatacaaatgacttgccagtcaacatgaaaggccaatgtgaggtttgtggtcatgaactttaagcaaggccagacagtgtggttatatatttttttctctggtgaggtttagctgcacgagtgctggcacaaagtaggtagagtatgtttttgccatgaaagtttgacaaaggcagaaaggggcaagggagttgagggtgtatgctagtgagtgattggcatgattgactggaatttaagccaaatatagagtgaagtgaggacattatgggggtgaaggaccatgaaaaggtgaaacattcagtagattaggggttccagtgggattgaaggactttggagtttagagtaccaggaccaatctgaaagacaggggttattgtcagacggaggaaagtgtaaaatcagttagaatcctagtcactctttttagttccattcaaatactgtctttttcataaagccctccttgacacccccaggattttgcttctcattctatccaatttctagaggactttaatgttacatttgtggctggtggcacattttgccatgcttatgtatttgttttatctctccccaacccaactaaagtataggctatttcaagggaagggctataattattattcttcgtgtctgtagcattcctagggcagactcttgaagctagactcagtacaaaattgaagatgtaaataaggtgagaagcaagaaagatttacagttgtttcaggttggattccccaagaagcgccctctgacatggagtttagtattcaggtcacttattagggagtggccttggatcaacacaggtatcagggaggggaaagaaatggtgttggacggaggaagaagtcgagctgcagtgcaggttcaacaacggcctcagccaacccctgcggagctctggagatatgatggctctttagagagccccccgtacccgtgtaggtcagcactggatgtgggacactcccaggaggtgcagctgaggcaattcctaaagtgactgacggctcttccagcagctgaggcaacacaccctcctgtatgggaagtgggtggtgtatcacacgattcatcacagcactttcattgtttcaaaattctgtgaggagtaagaaaaaatataaaagacttctattttcagagggaatggaagaaggtggtttatatgggtgaagactgtgggaggtgtgatgacttttgaagaggaagtggtgtggaataaattttgccatagtttcacttgctttggtatcttcctttctttatggcacatctatctttttgcccaattaatagaaaatcatgctatttttcatcatcacagtatttttttgctatgtttttattgttgtttttaccagactgtttcagactccaagccagatttgtcactccagctgatcttctttgatggtgaagaggcttttcttcactggtctcctcaagattctctctatgggtctcgacacttagctgcaaagatggcatcgaccccgcacccacctggagcgagaggcaccagccaactgcatggcatggttagtctgggcaatttccctagcactgtagctgtaggctccgcttccaaggaaaaggttgcaaaagccaagtaaagacctaaaaatgccacagcatccttggagcacagtgtttatgatagaacattccttggcaggcattgggtttttgaggaatcccagagctaaaaagaatgattctgagctggctctgtggctcatacctgtaatcccagcattttgggaggttgaggtgggaggatcacttgagcccaggagttcgagaccagactgggcaacataaggggacttcgtctctacaacaaataaaataattagctgggtgttgtgtatgcctgtaatcttagctactcaagaggctaaggcaggaggattgtttgagcccaggagttcgaggctgccgtgagctatgattgctccattgcactccagcctgggtgacagagggagactctgttaaaaaagaaagaaagaaagaaaaattgctggttagaagccatgtttgactgagcttaattaaaatgataaaatcatgtaaaaaattggattacaggaacttcagattcagttgggcccaatgggagcacattcccccagtactgtatggaggtggagagagcaaaccccttctttcaggcctttataagtctgaagaacatggggctttgggaaatggaataaaagaggggtgagggtgaagaatttccttggtggcttcaaagtattaccgtgactccagtgtgactatgacagtttgatgtgttggttttgatgtggcatttttgacatgggggtggggatattttgatgctgccttaaaaccctgctattattactaagtaatgagtgcaacacacagcctcattttcatccccattcctgggcccacactccatccctaatccctcccccgacccctgcatcttctcctgactctgactctcttcccatatttgatcttctttctgtccccacgtcttcactaaccccagcttggaacctcatgctacccttgagacttcactagccccggtgccttcatccctccctgacgctcaccccatctgtgaactgatagcttattcccagcacccccgcttattcctatccattgccctatcactgaccttcgccctataaaagtacaaatggtcacattctgtgtcctctgtgaccctaacacacctcctgttggcatttgctctccctcctgttatccattggcagctcctaatgggccaggggaatgtggtcagcatatcattcattcacttgtgcccaagtgcccaaaaagcattcagaacatattcacaagaggagacgcctggttgatcagcagtagaacaaagttatttatttatcagtccaaatatatgaagccacagtgattcatatatttggactgataaataaatttgttgaatgaagatcatttttttccagaaacaaacccttaatagattaaccaaccttgtgaatatgttcctatttcaaagaagcctattttttcctatgatgaatatattgaattttcattcatgaattttttcatactatgtctttaggatcacacactctgaaaatatttatctaatatgtgttaggatgtatgctaaatatttatccacacattattttacttagataaatgaggaggtcttaatctagtgagtagtcttcagagagtcctcgtgatgagatgaaagagagctataaccagaaggaaactttagagatcagctagtttgagcttcttatttgatacacaaggaaatggagatccagagacacaatgttatatagctcctgtacaaggaatttttcttagatactacttgatcaataaatagttactgtccaagtgccttcctttgagagttttatcattacagattaaggataaaatggctaaacagagtggattagaagatcagataggcttggactcctttctgaaaataaatgtatgcttttaatgttcacaaaatattcatccaaatgtcttcttcctaatttatccttagtgatatccttttggagttacatacacaaataatcaatattttgctatttgtccacattacataagcaagatttaaagagttctccaaaataattagcataaaatgttagtaaatctttggttcattcatatagcttgccatattattctcaattactgaaatgcagttaattttgactgattgtatttccctgttgatgaatataaaacacgttttggtgatggtgattaaacattactttttctccctcaggatttattggtcttattggatttgattggagctccaaacccaacgtttcccaatttttttccaaactcagccaggtggttcgaaagacttcaagcaattggtaagcaccactgttattaatgaataaaacatcatttcttgctactgacagatactacatttttaacatttaaaatttataatttggctgggcgcagtggctcacacctgtaatcctagcactttgggaggccaaggcaggcagatcagctagggtcaggagtttgagaccagcctggccaacatgaaacagggctttcatgtttagtagagacggggtttcactaaacaaatacaaaataaatacaaaaattagctgggtgtggtggcgggcacctgtaatcccagctacttgataggctgaggcatgagaatcacttgaacctgggaagcagaagttgcagtgagccaagatggtgccattgcactccagcctgggtgacagggtgaggcgccatctcaaaaaagaaaaaaaaattataatttaagtatatgatttaaatgtgtaatatactttattggctttttttcttgcttaattgattagtttattattcttttcatctttgtagtaagcccagtttattttcctgcatgaaactatattttgaaatggaaacataaaatactacatttcatgtttgcacatccttaaaaatggtttgaaaatatttgaaaatattttcccagagtcctgtttgaagcaggtagaatgcgtttcgagagaaaagtttactcaacaaagcatgctggctaatgatgaatatgatgtccttataatgataccaaaagatattcttcagtttttcttttccatctctgtctttgccatcttctattttctaccttatccagatattattttcctttaaatctagtacagtctctgccaattttccaaagaagcaagagatcaggataaagagaaagccagatcctttgagatttagagtcaaataaatgggagttgactaggccagaccaggtcaggtcaggccagcccaagaaacatacgtatctatggctgaagaggggagcttggggcttggagaaagaaaaggagaataactttgtactaccaccctacccaaaacaaaacaaaacaaaacaaagcaaactcttggcaggcatcagggaaagatgaaaatgagattgatctttattgtagaatccaggccagggggctgctttgaaggcaagaatttcatgctagaaattccttactagccacacaaacttcttggagcaagatagacttgtattacttctaacagtgggaaaaacactgccatcataactcacacttttgccatgagtaaagaatttgtctagaatcttagagaaacttctgcttgaactttaggtgcatgtcattgacaaatttcatttcctagtttgaaagagttactctaatggtgttattaatataaacttcttgggcttcttccttgcagcatattttccttactttgatggtagccttgagaaactgagtttggctttctttcaaggattttgtgcacttttattatgtcctgtaccagaatgaacttatgccaataacttgcaccttcattcaattttaacccattgtgcccctcctattggtatttacatttcaaaccatatctctagttgtataagagaaagcagtgagctgaggtggcgccactgcactccagcctgggcgacagcgagactccatctcaaaaaaaaaaaaaaaaaaaaagaaaaagttgtgtctcatggtaaaggaattataagtatcaataaacagacaagaatattgtttttggtggtagttagggctttctcaatgtttctagaatcatattacatatgattgattactagttggtttagttttaccttagctagttcctagctatcctaggaagtttcatttggttgtcttataatattcatgtaatctcttgtcatcttgtaacatacaatacatgacttatgtaggccagtggttctcaaactttaaagtgcatcagaatcacctggagggcttcttccacacagattgctggactccagccccagaatttctgtaagtctgagatgggaccagataatttgcatttctgacacgttcctaggtgttgctgatgttgctggtcagacatcacactttgagaaccactgatgtaggtcacactaggtatctctttcccatagagtggccacttgatatacttcatctctactctgtttgagtattccccttttaagccccatatctcatctaaggcattcttcatgcagcatcttggacctataagcatctacacctgcacctgtgttgtccccttccacccacctgtcctctgtttttttcattctctatctcttcactgttctgtggagtttctacctctaaggaggttctcacctgtaagtttagagccacatttgactcttctctcttcctgctccaaagtgtacacatccctgttcaacccagatgtttattgtcatgggtgtggccatgcttgctgttgcataatcttttacaaattatggacacatgtgctaagatttcaaactccttaaataaggatacattatgagtcttgataagataaaaatagttgttcatttactgtataattgtcatctacagaacatgaacttcatgaattgggtttgctcaaggatcactctttggaggggcggtatttccagaattacagttatggaggtgtgattcaggatgaccatattccatttttaagaagaggtaatgtgtgtgtgtgtgtgtgtttgtgtgtgtgtgcgtgcacagcctgattttggagtacaacggtgggatatgagaaagtacacagatgatgatgaattatcagctgtctttatgtggtacagagctccctctgcttgaagaatgaccctttctagtttactcactggagtaatgcacattgttacaagttggttctttcttaataggtgttccagttctgcatctgataccgtctcctttccctgaagtctggcacaccatggatgacaatgaagaaaatttggatgaatcaaccattgacaatctaaacaaaatcctacaagtctttgtgttggaatatcttcatttgtaatactctgatttagtttaggataattggttctagaattgaattcaaaagtcaaggcatcatttaaaataatctgatttcagacaaatgctgtgtggaaacatctatcctatagatcatcctattcttatgtgtctttggttatcagatcaattacagaataattgtgttgtgatattgtgtcctaaattgctcattaatttttatttacagattgaaaaagagggaccgtgtaaagaaaatggaaaataaatatctttcaaagactcttttagataaacacgatgaggcaaaatcaggttcattcattcaacgatagtttctcaacagtacttaaatagcggttggaaaacgtagccttcattttatgattttttcatatgtggaaatctattacatgtaatacaaaacaaacatgtagtttgaaggcggtcagatttctttgagaaatctttgtagagttaattttatggaaattaaaatcagaattaaatgcta

SEQ ID NO: 322 - DNA, 289095 bp, Homo sapiens
tctctttcactcttgggcctagcgaggcagcttatttttcctttttctttcattggtcacagttatttcttttcagtgtgtcatcttctctaagtttctgagggagtgttagcttgaggccttgccttgacataatcagatataatcagaaaaatgaaaaattccataggaaagagaactattttagccaaggtgtgcgagagaaataccgccactttcaagcactgttttcttctactggagtctgctcaatagggacgtcagctttgctggggtaagtaaaagcatcctggccttaacctatataatgggggagtaattgcctcttagaatcatcaagtctaagttctgaattaggcccaggatatgactacttttctttacactgcatttgaaatttcatttggctttctgggtgcgagatccacatttcttttctaacagaatgttttatttttcgtcaattgatttcattatgataagctgatggcaaatgctacttcctcactcaacagggcttgcagtctgaatgtgcctgaatacattttatgataaataatatatcctgctatcctgcattcatccagtgcagcctgaggaagcagatggagttacagccttcttctcaaagcagaaagaaactatagctttgaggaagagaatgagatcattacatggcttcccaatttcatcttgataaactctgaagctgccatattgcagtagttttcaactataggtgggaagcttgactttcctttgagttcaaaggagaaaactgttgcttaaagaaaaatgtgttttttccctaagtatgagttactccttccagaaaaaaaataaaaaagccccatgcatgcaggtctgtgatgaatacatttaggacagtcctgtggcctgctattaaggctggagtgacactatccctaaccctaaggtgaaaagtaatgttaaaaataaaaattatactgagctgctagttattttgcctacaggagtgcatgcctgtgtctggtggaacttggtttttctctgaatttgccaggcaattttctctgaatttgccaggtaggcagaggagaatttgaaaactgtagagaggagcttgacctcccaaagccaatctggcactctgctacttccttcttccacagtttcttctctgtttccagatcttgcaaatgtacagtcaagactgcttggagtattattccattaacagacatacagttacattaagccattaatcaggcagatcacagatgttgttttctgtctagatgttactataattactcttaataacacccactgagtttgtcatttcatccattgatgactttttaaaaaattcttggaaaattcatttcttacagcctaattatatggatttaagggttcaggatctctcctcaggttttcatcatgtattttttaaagagtatagcagtataacatcacatatgggtggattaataggctcttgagaaactgaaggttgaaacccacatgctgactttttacagttaaatcatactcctctcgtgctaaacgatgagccttatcttttgaagcatgtgatactgataagtccagtgaaggaggctgcctttcaaaggaacggagctctgaggaatggaatggaacttagtctagctgcctagtttacagatgataaaactaggacctagagaaatgaagtctgaattactgagagaaaaggacaccagagtccaaggctcagagctctcaatccagtgttgcttcttcttgtttattttgttttgttttgagatggagtcttgctctgtcacccaggctggcgtgcagtggcgcaatctcagctcaatgcaacctctgcctcctggattcaagcaattctcccatctcagcctcccaagtagctaggattacaggcatgcaccaccatgcctggctaatttttgttttgttttttgttttttgttttttagtagagacggagtttcaccatgttggccaggctggtctcgaactcctgacctcaggtgatccgcccacagcctcccaaagtgctgggattacaagcgtaagcaccgcacctggcccagtgttgcttctactaccactttcattcttcaaacagcttctgccatgtcagaagggaatgaaaatttcttttgtgactcaaaagtaaactaaaactcgttggattcctgagactgattctacccatttacccactctccttaaagtaaaacttagccaggcattcttaaattttgctttgaacctagggagttctagcttttctgctgattaaatgtcactgatttctcattttctggtgacattgttttacaattcttttaactacaaagtttaagtttctggagccttttcttcttttcattttttataaaatacccttttattaagagatgaagttgggtagtcagaataggagtgggtattgtttagtagaaaaaaaacgggctttggaataaaacttgcatatgaattacagttctgcttcctataattgtgtaaccttggcaagttactgcgcctgtcaaatgctcacattaaaagagtgtgtgtgtgtgtgtgtgtgtgtaattgccagtacaattcaataattggcccacagaaggcacttaataattgctagttactactaagagaaccagatgagaaagaatattaatggatatggcattttttgtttattaagtactgtcttaaacgtctggagaaaagaaggagaatctcattttctgctttcgttattagtgatcactggctgctgttgccaatgcagggagccttgcagatagttagcagcctgaaaacaacttgtattatttgagaggaggtacttttgtctcttagataaagtttttgcaggtcgctctggtatggtgcagtatcaatctgaactcattaagttgaagaagtgacacaggaacacaagaatacattgtttctttgcctcatctgcttaattaaaaattccagatccctccactcacaagcaagattgatggtgaaatcttcacacacatgctaccgtatgttctctacctcctcctccccaagtacaacctagagcagtggttcccaaatatgcttcctgggccggctgtatcagaattactcgggaactattagaagggcaaaacctcaggccctgccgcagacatgctgagtcagaaactcgggatcactcagaaatctgttttaaataggccttcaggtgattctgatggagttccagaaccatgacctggagaacatgcccagttactatatgtactgcagtgtttctcaaagtgaagaacaggtaccatgatagaaccaaaaatgatcttaggtaggacaaagatgactttaggtgatactcacgtattatatcaaatagctagatcacatagtaaaagttttccctctcaactctctttccatcattaagtctcattttggtatgactagacctttaatacctctctacccattgctaatctcccatttcaacaaagagagctggatgcaattttgatgtctttaggtagcagcagggtccagctaaaactcagcaatagttttcttctctttatggcatgctatttaaatggtgataaacttttcctttataaatgtttacattaattaatcaaaaaagttaaaatacagttggcacgtggattagcaaaattatgtcagtgatatggcagtgaatgtatttagagaaatgctggtatgctagaaagaacctagttacatcagtgctttaatttcatttgtgccatttattagctgtgctattttcttagctgtgctacttttgtaagcctcaattttctcatctatcaaatgggagtgataccaacatcatagaaatggtataagaacttatgaatggaatatgcctcctgtaaccctcagaacatagtaggaacttgctacatccttattctctcaaatctcactttgaagtcaggtttctgtgtggccttctcaatagcatttctgttggggcttcagattcttcatttgtaatgtgacagtaaagacttgaagatctgaaaggttccttccagctcttaactaatatgtatttacacatgtgtattgtatgtgtgtatgtttacatatagtgtaaattctgcatataagtatgacttaggcataaatagttattttccccaggcataaacctggagtgtgcagggataatattgaaaatagatggctgtgttggaaaaataaaaaatcaaattgtgagagatgtgggcgctgatatacatatcagagctcaaaggtaatttcattgtattttaccatcatctgtcaaacttaaagcaataccgacactagaaaatagatttttgcagaggtttctgaggacaatggtttccatgagctggtgtaaatatattcagagagacttgttcctacttaataacccgcgtttttccttctgaattgctgatgcattcatttatagcatttgaaaggcagtttgtcctttgctgtcaagtgaacttgacacaataataagaaattctgaaaaattcaatcaaatcttgttgcttctcaaaggaatttctcgactacttattctgtttaaggagaaaaagagaagacagtgtttctttggtcttgtataaaacactaaccaagtttaacagcacaggttcttgttagcaggtgccacatggagttttccctctcagtaatccaggggacagttctaactgaggtttgggggttctttgggaagtagcagcaatacataaggggtcaccgcaaggctgtactgttataaaatcagaagctgttatcagcttatttattgcttacaatatgcttgtgaatctggagacctaaaaacagagaaatggcgaaacttgcttctcttccttagacgataaaatagcttgcattgtcttttacataactgactattatagaatcccagaagctagatacactcaaatattggcaattctgatgaaatgccccaggaactattagacttgatttaacaggcactgaactgaaaattagcatgtaagacagagagaatgtgcttgcaatcatgcagacaacagttcaaattactctctttgagctccagtctccttatctataaactgaggataaaatgtttctacctcacaagattgtcctgagaattaatcgaagaggtaatattggaagtagccagaacatctaacattaactgagtacttactatctgccagttgctatttcaagggcttcaaccgcataggatcatttaagcctcaataaatctctgagatagttactattattagctccatgttgtggatgtaggaacttataccagagaaaatgtaattaacttgccagccacaatgtggcaggaagagacagagccaacatgggaacccaaaaagtctggctgcagatgctccttctttaaggcttaaaaacacttgacattgttatcagcatttcatatgagttgaaccatgtgaaattataaatacttgaccatttttgacataaaaatagcaattttttgtggtggtacctactaagcgctggatatgtattagtagtagctacagttgctactactgctaatagcagcaatcataatattgattttatcccaaaccctcactcattaaggaatacaggtggcattatagagtaaaaactactagcttggcgatcagaagctgggtgaactctaggtcttaattctcccatttgtaaaataatgggattggtcttttccagttttaattgtcaatggcagaaccttaaaaactacctatgaggaagaaccagatatttctgtccaatctatcttggaccaatatctagttctgttatgaatgactagtatatagttcctgtcatatacaactcaccatgtgagtttgacaatacccaaattggtacctagcctgctcaacacggcaagtttagtgagcacatgcttggatattgtactagaatcaaatttaggcactcatttctaaatacctattttcaatgcctgtacttaacttgctacaacccaatagtaaacagtttgtggactgacactagtttatgcactaccctttcaatagcattggaactctgtgatatatatataaataaattcttaaagggaatatgtgcatgtctgtgttcccttcttttagaaatgtattctctttggagattagaaatgagtgtccacaaagcaaaagaatatttttaaaagaaagaccacagatggatcataaaaacaatagtacttggggcattcatataagatagggaaaagacatcagcgtgtaccaaattttgttagtacatgtatttttttaatgttttttatttaaacaataattaacagtctttggtgtcatcatatttgaagcactagagaattagagataaatgagacatggtgaccgtcctcatagctcacagtctagccagagaccccagaatgttagcacataattgtagaatagtgactaatgttctgaaggaagatgtatttaatttggcttgggtatcacagggggctctacgctttcaggtgtgatttcttacattttgttgtttagaatggttttactttatttttttaaaaaaactttttgttcatttatgacacatacaatatgaactaatctgaaatgcacagcttgatgaactataacaaagtgaacactttgtatgtagctaccacttgatcaagaaataaaatgctaccagctttcgagaaggtcctggtgtgcctcttcccagtcaccaccctctcccttttcacaaatgtaaccacattcctaatttccaacaccaagaactaagtttgcctgttcttaaaacctgtgaatggaaccacactgatatgttccttggtgtctggctcttttgcttaatgtcatgtccacagtcatggttcccaaactgcgggctaaagcatcccagggtaccacaatgtgctcataaggaaacagcaggatattttttaaattttagagtcacatagtgataattgacaactttcagacactgaatgaaataatagcccatagtagttcagtttcaacattagattgtgctacatttcttttgatgctatatcttttaacaccagattttcaagagtatctgtgattaaaagcaagtacacacaaaagtcaacatgaaacaaataagggtggccaaatccgatctgattccaatattcaagaagctttggtatgcccaacaggcacacaaatcctattagtaatttcttgtggttatttaaggatgaaaaatatcagtttttttctttcaatttatgtgtatttttaacatgaccgctaagttattataacataagtattggtcagggacagtgtctcatgcctgtaatcccagcactttgggaggccaaggtgggcagatcacttgaggccaggagttcaagaccagcctggccaagtagcaaaatcccatctctactaaaaatacaaaaattatcaggacatgttggtgcatgcctgtaatcccaactactcaggatgctgaggcaggagaatcacttgaacccgggaggtggacattacagtgagcccatatggagccactacactccagcctaggcgacagaccaacactgtttctcaaaaaaaaaaaaacaaagtatttattaagttattgggaccttactacttcataatcagaactattatgtatttcttttggtgtggtggcacctgtgaaaaaattcctacgacactaagggagctaagaaagtttgagaaatctcattatgagattcatttttgttgcttcatggaatagtcatttgttaattttcatttgtgtgtggttttctatcatgtgagtacaccacaacttacgtacattttctactcttgatggaaatttggattgtttccaggttggggcaattatgaagaatgttcctatgaacagtttttggcatatcttttagcacatatatgtgtgtgtgtgtatatatatatatttctgttgggtatgtatttaggagtgaagttgctgagctttaactgatactgctaaacagttttctaaattaattattccaatttacattcccaccatggttgttggagagtatcagttgttttactcaaaataacccttaatatttgaagttattttaatactagtaaatgtaggcatatacagatttttgtactttgtaaagcttaattcaattttggggattctacttaagaaaataatactaaacaaatttaagtttaaaatgagtaattattaaaaatgagaaaataaattacagaaaagtataaaattttaaagctaaaaaataaccccaaatattacaaaatgaaaaaaacttgagaaaaataatatgaattcactgcccatcacacccctgcattgttttgttcctatgtccttttgctggacattcttgaattgccccttcaaaacaattttgtattctcattttttatggagagatagattggtctttgttacagtatgtttgatcaaaactttttaaatatagtttagaaaagtttctttaggttcacaatttgtcaaatttggggaaatctctatcagattttttttaatgaactgcagattttcagttccttttaagttgcatggtaagcttaagtgctctttgaattggaacactcattaacagctttttttttttgtcaatgctctgttggtagtaacttacgtgtttgcttagatactcctctttgttgacatctaaatcaacgaggcaggcaatagggtatacctagaagccatttctacctttggaaagctggcaattagttactcagtaagtactcagtaggtaaggcaattaagtactcaaggctgaccacaaaccactaaaaatatttcactaaactgaaactaaacatatccccaactcactttaacccttaccagttcccacatatacacatagctacttctattgaagtgattatatgacttatctcctcttttttctaaacctctttatgttgaaatatattagttgcttttctaacatgaagccagccttgcattcctggaatgtatgccacctggtcattatgtattagcctttctatcaatctctggatttgtctggaaatatttggtttaggattgttgcttttatgtttataaaagattgacctataatatacttttggatttttctttcattttatttaaggtgttcatctgcttttggtatcaatgctctgctgtcctcataaaataaattgggaagtgttttctatttttatgttttctgaaacaacttgtataagattgatggtactccttagctcttggaagaaattaccagccaagccacatgggccctgatttttgtgtgtgtgtgtgtgtgggaatgttttaaataatgaattcaattgctttaataaatataggatgattcagattttctgtttcttcttataaaaaagaggctttatttttctagggctatatcctagaagaattattattaaataaatttttaaatttattgatacaaatgtgctcatatcttccaatggtattatttttaaaatatcagttgaatttttaatattccttaagttcccttcattcctttggttattggttatttgtttcttctcttttttctgttttatcagttagctttttcatagtaccaaattttggatttttaaaattctttctgctatattttttatattgaccttcttccgtttacatttgttgggttccattcgctctttatttttttatcttcttgtaaaatatacttaaacaattggtttttagcctttcttcttttctaatataggcatttaaggctatcgtttccccaatcatagctttaggtgcatcccatacattttgatatgccgtatattcattttcatgtaatttaagatattttagaaacttccattttgatttattctttggtccatgggttatttagaagttattgcttggttttcaaacttaggggaaaatgttttttagttatcctttggttacttatttctagcttatatctattatggtctgaaaacatgtctatcatttcaagtctttgaaatttttttgagacttgctttatggctagcctgtggcctattttaataaatgtttcatgagcccttgaaatccttgtaggccgggcgcgatggctcatgcctgtaatcccagcattttgggaggccgaggcgggtggatcacctgaggtcaggagttcaagacctccttggccaacatggtgaaaccccatctctactaaaaatacaaaaattagctgggcatggtggcacgcacctgtaatcccagctacttgggaggctgaggcagtagaatcgcttgtgcccaggaggcagatgctgcagtgaactgagagcttgccactgcactccagcctaggtgacagagcaagacttctttaaaaaaataataataaattaaataaaaagaaatcctatgtaaaactaggagtatacagtcaaataccctgtattaattgggttagttacttcttcctctcccctttagtgaggttatgttatttatttgaaatatagctgagtttatttttcagttttatttttctccttcccatctttgtcaatttaattttttattgaatatagagaacattaaactacatctaaatatcaaaattatacaaaaacatatgctcagaaaagtgacactgcctcctgtatttcttctgcttcattcccctacctcatatgggagccaatgttgttcttgtcattgacttcctgggtttctctttgtaaagataagtagatgtacacatattctcttacttctccttctttcttttatacaaggtaacatgtaagcttctttgcaatttgctttttttttcacctaacaatgtatcccagaggtcattctacatcagttcgtagagatcttcctcattctttgtttacaactgcattgtattccattgaatgtatggggttatagtttaatcagtgtcctatgctcagacattttggtagtttcctacagatattactttaatgagtagcctcataaatatatatgtatcttcaggataaattcctagaaatgggctgctgagatgaaagacagatgcatgtatagttttattaactgatgccaaatctccctcagtaaggattttgcattccaaccaatctgcatgcctaccagtaattcatgttttccacagccctatgaacgaaatatatcatcaagctttgaattttttgcccatctaagtgagaaatagtatctcagtgaattttaacttgcatttatcttaacatgaattaacttaaatagcttttcatatgttcaaggcccatgcttatattattttataaattgcctctctttttcttttgttcattttgctatagaatgataatttttccttcttttccagtttgtcatttgtcttttgactttgcttctggtatttttgccatatgtagtcagtttatcaatcttttatcacatctggacgttttagtatcagctaaaaactttttcataaacctagaatataggggaactcaccaatattttcttgcagtaaagttacattattttacatttagaattctgatccatttattttcctatatatgatatgaagaaggaatctgtttttctatttgtgaaaaaatggttatccagttgcccaacatcatttatttaaaagactatcttttccttagtgatttgagatacaacctttttaatatactagatttctatagatttctattccgttagtctgtttgtatcctcatgagccactaccacactattttaattatagtctttacagtgttaataggactatacccccttcatagctcttcctagtgactgtttttctacctattcttatgcatttatttttccatgtgaactttagtcccaatatatctaacttgacaagaaagcttgtcaatattttcttgggtgaatctataaattaacataattaacagatattaaaataatgaaaaatgagattttcattatgttgagacatcctaaacaagaacaagggccatctttccactttcaaatgtacttttgcatctttcagaggtatttatagtttcttcatatacatttgaacatatcttattgtgcttgctcctaaatatttttgttggtattgtaaataaaattttcttattatatattttacctattatctgtgtacatgaatgctattgagttttgttatagcttcattctataatgtggtttttagcattataaaatatcttttgcctcctgttatgctgttttctactttgtccaatatgaggatttcagttcctacttccttattgttttcatttgcctagtaaacaggcaaatgcttttgcccattcctttatctttagcctttttaaaaactgctatattttagatatgtctcttatatacaacatagagttgaaatttgatgggtcaatttgagaatctttttattttaataggtgagttaaactcatttgtgtttattgatataactgccaagcctctcatcttatgttgtaattactataagcactatatttactgtgttttttctatctgatgttcctttgcttttccttttccctttggctattatgaagtttttgtgcttttgttttggtgtttagttttatacctttgtggtacccttgactttttttggtctcacttaagcttttaaagctttcaatggctaccccttctcataacaaaatccaatatctttgccatggcccataagacttttcataacatagtttttgactacatatctgaagggtttttttctgccactctgcacttaatcactgaattccagcaactgaactttcttcgtcatcctaaatatattctcatctgaagtccttcacacttgagttttctccttcagaatatccttctcccttccccaaaatttttacacaattcaatatcccatttcattcaggttgtattagtcagttttttgctttactataaaggaatacctgagactaggtaatctataaagaaaagagggttaattgatgtatggttctgcaggctgtacaagcatggcaccaacatctactcagcttctggtggggccttaggaagcttacagttatggtggaaggcaaagcaggagcttgcacctcacatggcaagagtgggagcaagagagggagaagggggaggtcccagactcttttaagtaaccagatatcatgttaactgagaactcaattatcaccaagaggttggtgctaaaccactcatgagggatccacccccatgatccaatcaccttccaccaggtcccacctccaacactgggaatcacatttcagtatgtgaattggagggacaaatgtccaaatgacatcacaggtcttggccttcatttcatttcatcatcaaaaatgtccctaaccctcttatttaaaagattactccacatcgttctctggtgtctagcataatggttgacttttttttctcaaagtatgtacattactaaccattattcattaaaatcacaggtagattctgaaggccaaagaaaaatatttgaatgggtcctttcaactaaagaatatattttccatggtttttaacataattaaaataatggtccagctaaaattctaaaacttaaaggtgtggcttaagtattttgaggctctcaaatagagaacagaagtggaatgggatttggcactcaagatgcaagtggttggccctgcctgataaccagatgacaggcctgtctgtgaaagtttttctctagattctttccacatcacaatttgaaagttacatctacatgtttttctgatggtgtaggtgggctgttttcttatgctccctgacctactttaacaggaatctaggataaatgtacattctgaacccatgagtaaaatgtgtatgatgtgaggaacctacagaatggaagtctagcaccagctgtcccatgtagttttccaacttcatgctacataaagcagagaagagaggcgtcatgaattgatgaagtatagttcagcaacctggggctttcagatttttgccagatgaaaagacaactggagctggcttttaagtaccggcataatcttttaattctggcaaaagtttatgagtaagagattgcctaatcctaaatgatgccaacaatctgtaactacattacagaatcctgatgtcaaagaatttgcttccaataaatttgctcaaacttctatgagacataaaatacctttatgaacagtaattgttattgtgtcttggtgagctaataacaagtacaggcgtatctccagggcaagaatggggtggaggatggatcatggggaaataactttaaaatggtctccagggctaaagcagatggtagtatatttgaaaaacgcaggataataaattatagctatttacatttctgctctgaaggcaattcctgtgttttctgtaggatgacttctttgcaaaggattattaacttcagagagaactacaacaaatgatattttaatgactagtatagtattaaaaatgtgttccttttgttgtgattttactgaaaaaaatcatattttggtagagagatcttgattatattttagaagctctgctgagtctttctcatgaagtaaaatggtaacacattttaggaagaaaaatactaacatgggtttccctttcagaaattactcatttcaacaaatatttaacaaggtcctgttatggtcacggcatggcactatgccaggtactaagaggaattaaatatatcccttgacctcaagccatttatgattttgtggagaatatttcaaaagctaaattttctgtatgatataaggtatagtaacaatatgtagctgacccaccccactcacatttatagtagctgattttgtaatatctgcttttaagacctttctagttgggaaaaaaagcaccataaactctttctgataataaccaaacaatttgtagtgttggataaatgtaatcagcaatgatgagaaaacatgatggactgactgatgaggtggaagactttgattgcctgaatatgtggtaagatcgtgtatgtatatgcctagaagccaaagtatgattttcgcaaagggttgtcgtaatacaaaacccttaagaaaagggaaagtgagatatcagaaaaaaaatacatttttggcttgagcaagggaatatttgatcgctctaggaggagaatctattgacataacctcacagttcagggaaaagctacaaggaattgtgacactgtggaatataaggaaaaaatggatagagactgggtatgaagggaggctccttgaaggaagtggtttttcatctcagctttgaaggttatgcatgggtgtaatatgtggaaaagaatgattgagtcagaggaaccagagggaccaaatgtatgaaaccctgaacttgctgggaaacttgtggagaaaaataatttcactgccttgttggtaaaagctaaggaagcaaagatagtttgcaagtagttcaccgagggtattattcagtaagcaatgaagagaatgtagggtgtgaagaataatgcaatgagactagagttttagaaagataactttggaagggcaatgtaaatgacaaggagaatatgtgtgacagtcattcacagcagagagaactttatctcatttagtcctctgcaataactagcatattgataagcagacattacacaaataattcagtcagcactaggttacagcatgtctaccacattcaagcatctgtggaggtgaaaaaaaatgaaaaaacttaaaattttttcaatgagtaatgaatttacagagttttgtggtcatccaaggtttagttgcccaactgtcattttctgtgtgtaaattgaaggggtacaagtgcaattttgttatatggatatatttcatagtgatgaagtcccagcttttagtgtatccaaataatatacattgtactcattaaataatctctcatcatttacctccctccctcccctcctcattcttttgaatctaatgtctatcattccccactctatgtccatgcgaacactttatttagcttccacctgtgagtgagaacatgtggtatttgagtttctgtttctgagttgtttcacttccttttgaaatggttttcattccactcccaaggatatcagcagttgggaccaagttcgaagaatgggccctataaaagattacaaattttattaaataaacaaactaggaagccagaacaatttaatcaaattggatgtgactaccaatcagagggcagaaaaccccatgaaggacctgctgtttttgtatatttctaacacatgaagaaaaatctttacctagaagccaaacattctaagccatgcctaacttgcctcctagacattatacaaacatgtacagtataagcaacagctgcttgacagagattttgaaatcaggaaaaggaaaagtctctttggttgaaaatgatgtggtaatatttatcctcacaatgctgtgtgtgccccaagcttgcctttatccttaacccctgaggtgagagagaagctgaattcaagccagtgggtcaagatccaaaagtagcacatgagcttattcccaatgcaggtgggaggtcccagagaacaacatgctctataaaactttgggcagcagatagagatgaccatatgctcctctttccatttctacttgtcattttctactcccctctcccctgtagatgactggaaagcaaaagctaaacattcttccgacaacaacaaaacaccacaagctatacatctcagcttgttcttcaacaagcacagtccatttctgagccagtgtttggaatttgaactgacaactcaacccaacaattttgctgctttgtctctctatctcgagttatttttttgtcacatcttagtccagggtgtgagaaacagagctcttacagattttttttttaatcttgctgaggaattatctctgtttcagctccacaacattccttttgaacattctcccactgagcatgtgttcagaggaacttcagcctcatcagtaatctatatctcagctgtcactacttttccagaaaaacctgaattctcagtttcaatggaacacacaaaataagttctcataagactaaggtggtatagatggcaaatgttgcaggcataaacatctggtcaaggggtgctatagatgcatacagactaagttcattctggacagcaccttaaggagaattgaagataccaaggtcttacagatcctcagtcctcaaggaaaaagcctgtcatgttaattagtccatactttggctagaaatctgtggggaagaaacgtataccacaaggagtgtaaccaaaaatttctcagcctgatgagaatttgtatgtgagtgtctgaaagcacattgtgaaccaaaagaagtattgtcacttgagcccgtaattaaggttttatttccttaaattttaagcatggttctccctattggcccatctgtacgtttcagttttatccatatttatctccatcaatagcatttcataaagaatgttgccctgaaaaaggcacatccttttgtacagatccattaatgatatatgtaaaatcaacctctatttatatctgcctcatgcagcccaagactgaacttcatcaccctagacagcatgctcattaccctaggagcataagaatcagatgttatgccctattagaagcactgttggtttgatcaccattttattttattttattattttattttggggacagggtcttgctatgtctcccaggctggagtgcagtggcatgatctcggcttattgcaacctccacctcccaggttcaagcgattctcatgcctcagcctcccaagtagctaggattacaggcttataccaccacacctggctaattttttgtatttttagtagagatgggattttgtctgttggccaagctgttctcaaactcctggcctcaagtgatccacccacctcagcctcccaaagaactggaattataggcatgagccaccatgcacagccttttggttatgattttaacaaccaggagtctattagatgattcatgttgtatgactgcccacaagtatggtagaaaaattgccaggaaaccacagggcatatattatattcataacaaagttttcccataaagttgaggtttccctctaaagtatttaatttataatttaactattttgcatgaaaacatttggaaatatgcttttaaagtcatttttaagatttaaaacgcgtcttctcactgccaaatgtaattgatttaaaaacatcacacaaagtaaaaatagggttctgtcttataaggtttcatttctcagctaaatttctccatctgtttataaattgtccagttcctccactagatcctttcacatattgtaatcatagttattttataatatttgtcttctaattctaacgtctgtacttctacaattgactattttttcacttgattatgaaccaacttttcctgctcctttgcctgtctcataatttttggttgtatgctggacattgtgtgggaaaatcaaacaggatgaaataaatattaactccttgaaaagagcatatccctttctattcagacagctgaggtggagagttgagtcaatctaatcatctaatctataactgagctgaatctgagatttgctgcagctttatttaaattcacttcaccactaccatcaaacaatttgaaggcagcattagggctttaccttcattgggtcttagaacctaattattagtgatagtttcaagattcccctgtattctacaacccagctttcagctgtccaagttgtatgagatttctcttgctctctcctcttatagcacaaccataaacttttgaggtagtatattttctctctgctctctagttctgtaaacagttttctatgccttgttaaatctctccatcatactagcctgccaccagccttcagtagactgatgctttatatttagtaaagttcccaggctcctcagagaaaatctctctctgattccctgccctactccagagtttggcacattaacactacgcacttggcacacatgccatgaaaagggttggagagtgacgagtgactgcagacttactttgggctagatttgcccaggattctaatgtgtcatgccagcccatgcctgaccataaaagattgataaaaattgggcttgtttctccttacccccacctatggcaggttttgttcttcttgtgccgtgccctccgggatgatacagctgtggcagtgttctctaggagtagcttctctctctctgtttatcatatttaggtatttttgtgtcgtcaggaagatgagggtttttttagagtataatcgtgtggcttatttagctttatctctttgacaagtgggagcaaatgtatcttaagagcagtctacattctagaagcacaggttatacagtaaaaattgaaagcctgtctccttgttctccagatacatccaagtgtgtacacattcacacacccttattcattcatttgtttcagtgtgggcatatgtgtgtaaattttaaaataaataccttgctatatactctctctacaacttaacactttttatcaacaatgtgttgagggcatttttccctattagtacatataaaactaccttattcttttgagtatttatatagtattttgttatattggttgagccatcacttatccaggcaatttcttactgatggacatttagttattaaatacataatactacaaatactgtagtcatgaacaatcttacaaaggtagccagagttttatgagtatttctaaggctgatttcctgaaggtaaaattgccagtttgaaggtgttggcttattttaaaaggtgataataaacacaatgtgatctcatactgctctgtggcattattatgattattattgctatactgcttggatgttctgattacttgttgacaaatgctgggctatttgaccccttgaacaaaggcctaagaccagagaagcaaactggcttttgtggaacacagctcccattattgttctataaaaggattctgtgttcaagttagattggaaattccagtatactttactcacctactttcgtttttagagatagagactctgggaagccataaagaaaagtgagaaatttaactttattcaaaccagtgttttccacacatcttgatcaaggaactctttattgcctattacctcttgacatcctatagaactgtaaacaattttgttctttttaaaataaatttatatgtttgtttcttcaatctcttccctggtaaggaggtattcagcacttttcacaatgaattgtcttttcttcttatctgctattccagaagggctttttgcttagagatggggtagattcatgcttgttagaattgtttacaaactagaaataagcagactttaaaaggaagcctgaggtgttacctcataattagtaattacagcttttagtgcctgaacactattgaacctacttgaccttcccaaaattcttctcttgtttcaagattttcatctgtattttcccacaaatgaagtattatgtacttggcaatctcctgaaatcctaacttaggaaagtctcctgcttatttaaagcttaagtaggggtaatgtgttctgccagaagaggaaactaggaaagttcagtaatcttattcatcataaggtatcagaagtgatctgtgcagttaaacaaggaaaattctatgctaggtagagtcaccattaattaagaacttactatatgccagccactgtgctaagaagtttacctgagtcaccacatttactaggctcaacaacaaactaagaaatactattattttctccattgaatgaataaagaactttgggctgagtgaatctaaaagaaaaaaaaaaagcgtgttgaaagtgacagagcaaatataaaaataagtgacaaagatgagagttaatataagcttgcccaatttcaaagtctgtctttaaccactacactattctgtccactctgtgtgtgtgtgtgtgtgtgtgtgtgtgtttgtgtatgtatgagagagagagagagagattgagaagaggcatacagaaacagggatagagagaatgagaataaaattaaccaaaggtattgtttggagatgtcagattaactaaaataagagtccgaggttgaaggccagcacaagctcaggtaaaattttcacttgtcagtgatccttctagattccattatatttgctgtcttcatttctactctagagcttccagtgacgtagttgtcaaatatgcaataaaaatctactctacagataatggaactatcaaaatctcaacttaaaaaaaaaatccagagtttcatacataaaaatttggctcaatttctaatgaacatagattacatgaaatcaacagtgttttctctatggatagcctataaatacaagtaaaaagtaaggctcaaatcaatctacagctgggagcacacttgaaaaagcaaagcattggtttttaaggctcaaaaaaatcttaaacctatttgatctggtgtcactattacaatttgccatatacagaaaacatgtatttattcagcacacatgtattgaacatttcacttccaaggcataaagtcaactgtcacaatgcctatacaaacacacagcaattaaaaaagttaagaagtgaattgctcgagtgcatttgggaatatttttaaaaatagaacattaaagaaaatatgcaatttgattcaacatatataaatcaataaatatgattcaccacataaacagaattaaaagcaaaaaccacataacctcgatagatgcagaaaagcttttgataaaatccaacatcccttcatgataaaagccctcaacagagtaggcatagaaggaacatacctcaagagccatctataaaatccacagccaacatcatactgaacaggcaaaacctggaaacattcccctttagaattggaacaagacaaggatgcccactcccaccactcctatcaacagagtactggaagtcctagtcagagcaatcagcaagagaaagaaataaaaggcatccggataggaaaggaagaagtcaaattatctctatttgctgacaatatcattctatacttagaaaaccctaaggactcccccagaaggcaactagaactgataaatgagtttaacaaggttgcaggatatgaaatcaatatacaaaaatcagtagcgtttctatacattaataacatctaggctaagagtcgaagaatatgattgcatttaaaataccacaaaaaaagtgaaatacccagaaatccagctaacgaatgagatgaaagattgctaaaaggaaaactacaaagactactggaagaaatcagagatgacataaatgaaaaatgttacgtactcatggattggaagaactgatatcattaatatggccatacttccctattggaatttagagattcaatgctattcctatcaacctaccaatgtcactcttcacagaattaggaaaaaacgattctaaactattctaaaacgcatatgaaaccaaaaaaagagtgcaaatagcaatcctgagcaaaaagaataaagccagaggaatcaaactacccaatttcaagccatactataagcgtgcagtaaccaaaacagcatggtactggcacaaacacagacatgtagctccatcaaacagaacagaaaaaccagaaataaaaccataaacctacaaccatctaatttttgataaggctgacaaaaacaacgaattgcttttttttttattattatactttaagttttagggtacatgtgcacaatgtgcaggttagttacatatgtatacatgtgccatgctggtgtgctgtaccaattaactcatcatttagaattaggtatatctcctaatgctatccctcccccctccccccaccccacaacagtccccagagtgtgatgttccccttcctgtgtccatgtgttctcattgttcaattcccatctatgagtgagaacatgcggtgtttggttttttgtccttgcgttagtttactgagaatgatgatttccaatttcatccatgtccctacaaatgacatgaactcatcattttttatggctgcatagtattccatggtgtatatgtgccacattttcttaatccagtctatcattgttgggcatttgggttggttccaagtctttgctattgtgaatagtgccgcaataaacatacgtgtgcatgtgtctttatagcagcatgatttatagtcctttgggtacatacccagtaatgggatggctggatcaaatggtatttctagttctagatccctgaggaatcgccacactgacttccacaatggttgaactagttcgcagtcccaccaacagtgtaaaagtgttcctatttctccacatcctctccagcacctgttgtttcctgactttttaatgattgccattctaactggtgtgagatggtatctcattgtggttttgatttgcatttctctgatggctagtgatgatgagcatttttttatgtgtcttttggctgcatcaatgtcttcttttgagaggtgtctgttcatgtccttcgcccactttttgatggggttgtttttatcttgtaaatttgtttaagttcattgtagattctggatattagccctttgtcagatgagtaggttgcaaaagttttctcccattttgtaggttgcctgttcactctgatggtagtttcttttgctgtgcagaagctctttagtttaattagatcccatttgtcaattttggcttctgttgccattgcttttggtgttttagacatgaagtccttgcccatgcctatgtcctgaatggtaatgcctaggttttcttctagggtttttatggttttaggtctaacgtgtaagtctttaatccatcttgaattaatttttgtataaggtgtaaggaagggatccagtttcagctttctacatatggctagccagggctacagtaaccaaaacagcatggttcttgtaccaaaacagagatatagatcaatggaacagaacagagccctcagaaataacgccacatatctgcaactatctgacctttgacaaacctgagaagaacaagcaatggggaaaggattccctatttaataaatgaattgcttttcaataaattgtgctgggataactggctagccatatgcaggtgaatgaaactggactcttacctttcaccctatacaaaaattaagatggattaaagatttaaatttgagacctcaagctattaaaatcctagaagaaaacctaggaaatgcccttctcaacattggctttggcaaagaatttttggctaagtccccaaaagccattgcaacaaaccaaaaattcaaaacctacagaatgggataaaatatttgtaaactgtgcatctgacaaaggtctaatatccagaatttatatgtaacttaacaagcaagaaacaatctcattaaaaactaggcaagtgacatgaacagacaccttttgaaagaagccatacacatggccaacaaaggtatgaaaaaatgctcaacatcactaatcagagaaatccaaatcaaaaccacaattagataccatctcacaccagtcagactggttataattaaaaagttaaaaaacagatgcaggcaaggttgaagagaaaaggtatcaggggaacctgcccccaatatttcaacgtaggttcttcctattttctgtaagtgttggccggctgagaaataaagagtacaaagagaggaattttacagctgggcctctgggggtgacatcacatattggtaggaccatgatgcccacctgagctgcaaaatcagcaggtttttattaaggatttcaaaaggggagggggtgtaggaacagggtgtaggtcacaaagatcacatgcttcaaatggcaaaaaggagaacaaagatcacgtgcttctgaggaaacaggaccagggcaaaaggcagaacttctgataagggtctgtgttcagtggcacacatattgtcttgataaacatcttaacagaaaacagggtttgagagcagagaaccgatctgaccaaatatttaccatgctggcatttcccaatcctagtaagcctgagggtactgcaggagaccagggcatatttcagtccttatctcaactgtatcagacagacactcctagagcggccgtttatagacttccccacaggaatgcaattcctttcccagggtcttaatattaatattccttgctaggaaaagaatttagtgatctctctcctacttgcatgtccatttataggctctctgcaagaagaaaaatatggctctttttgccctaccctgcaggcagtcagaccttatggttgtcttccctcgctaaaaatcgctgttattctgttctttttcaaggtgcactgatttcatattcaaacacatattttacaatcaatttgtacagttagcacaattatagtgatccggaggagacgtacatcctcagcttacgaagataaaaggattaagagattaaagtaagacaggcataagaaattataaaagtattaatttgggaagtgataaatgtccatgaaatcttcacgatttacgttcctctgccatggctccagctggtccttctgttcggggtccctgacttcccgcaacaaaaagggaatgcttgtacactgctggtgggaaggtaaattagttcaaccactgtggaaagcagtttggagattgctcaaaacttaaagcagagctaccattcaactcaggaataccattactgagtatatacccaaaggaaaatagagagttatacaaaaaaagacacatacactcatatgttcattgccatgctactcacaataacaaagacatggaaccaacctaggtgcccatcaacaatgaacaggataaagaaaatgtggtacgtttataccatggaatactatgcagccataaagaagaataaaatcattttctttgcagcaaagtggatgaagctggaggccgtgattctaagctaattaactcaggagcaaaacaacaaatactgcacgttctcacttataaattggagctaaacattgagtgcacatggacataaacatgggaacaatagacactgctgactactggtcaggggaagggcggaggtgggaagaggagtatgtgttgaaaaacaacctattgggtactatgctcactacctggatacagtataccatgtaataaacctgcacatgtatccccgtatctaaaatgaaagtcaaatttttttaaaggatgctactgactactgacatacagataaaccagcaggaaataattaaatggcattggtgaaataaattttaattggaaatctcattgtattagtctgttttcacactgctgataaagacatacccaagactggcaatttacaaaagaaagagttttgatggactcacagttccacatgctggggaggcctcacaatgttggtggaaggtgaaaggcatgtctcacatggcagcagacaagagaataggagccaagagaaagggtttccccttataaaatcatcaggtcttgtgagacttactcattaccatgagaacagtatgggggaaactgcccccatgattaaattatctcccactggatttctcccacaacatgaaggaattatgggagctacaattcaagatgagatttgggtggacacacagccaaaccatatcactcatattcaacaagtatttgctgagcaactattacatgcgagacatgtgctaggtccttggaacacaggaaatatgtaggacagtctctgacctcaaacagctcacagcagagtggggtagagagacataaaaaggataataatcacacaatccattaagggatgtaatagtgacataaacaaaaaggtgaattaaagtcccagagaatggttaactttaatgcaaagcataaagctagttgacatgctctggaaatgttaaaaaaaagagtttaaggaacacaggcctattttaccaaacaggaaaccaggaacagggagagaaggtggcttgcccaaagctagcaattggcggattgggactagaaagatccttgacacccaggctagtgccttctcacatgcaattgaaaaacctttacacagtcatgcattgcataacaatgtttcagtcaatgaaagattgcatataccacagaggtcccacaatattacaatatatatttttactcttcctgttttatgtttagatatacaaacacttaaccattatgttacagtggcctacggtattcagcaaagaaacatgctgtatttgtttgtagcctaggagcaataggctatatcatataccctaggtgtgtagtaggctacaccatctaggtttgtacaagttcactccataatgtacacacaacgatgaaatcacctaatgacatttctcagattgttggcccattgttaagcaacaaatgactgtattcaaagaagacatgaccttctctggcatgcctcttgcctgggagcagttgcaaccactgacttctactcctgagcttcttaggttgggatgaatatttgtgatcatgcccatgtacctgctggaacaacaattttataaaaatgaaaaatgtggggttgggtgcagtggctcaagcctgtaatcccagcactttgggaggctgaggtggttggatcacgaggtcaggagatcgagaccatcctggctaacatggtgaaaccctgtctctactaaaaatacaaaaaattagccaggggaggtggcgggctagtcccagctgctcgggaggctgaggtaggagaatggtgtgaacccaggaggcggagcttgcagtaagccgagatcacgtcactgttctccagcctgggtgacagagccagactccgtctcaaaaaaaagaaaaatgtgtaaacatggttatgtctaatactggaaatatgactgatttattctgcgtacttatttgtattttccaaataccataaacacttattggggttttggggcttttcattttaatttttaatttttgtgggtacattgtaggtgtatatatttacgggctatatgaaatatgttattttgtttgttttttggagacggagtctcactctgtcgcccaggctggagtgcagcgccgcgatctcagctcactgcaagctccgcctactgggttcatgccattctcctgcctcagcctcccaagtagctgggactacaggcggctgccaccacgcctggctaattttttgtatctttagtagccaggatggtctcgatctcctgacctcatgatctgcccacctcggcctcccaaagtgttgggattacaggcgtaggccacagagcctggctgaaatatgttttcttaaattttaattttaagttctgggttaacttaaaatttaagcacgtgcaagtttgttacataggtaaatgtgtgccacggtggtttgccatacctatcaacccatcacctaggtattaagtctagcatgtataagctattttttctaatgtttgccctcaccccaccccactccctgacaggccccagtgtgtgttcccctccctgtgtccatgtgttctcattgttcagctcccacttataagtatgaacatgtgttgtttggttttctgttactgtgttagtttgctgaggataatggtttccagctccacccatattcctgcaaaggacatgatttcattcctttttatggctgtatagtattccatggtgtatatgtaccacattttatttatccagcctatctacatgaaatattttgatataggcatgcaatgtgtaataatcacatcagggtaaatgggggtatctatcacctcagcatttatcctttgtgttacaatccaattacactctttattttatatatatatatatatatatatatatatatatatgtatatatatatgtatatgtaattttttactatagtcacccttttgtgttaataagtactaggtcttattcattatttctattttttgtacccattagccatctccactacccctccaactaccctgtactacccttcccagtctctagtaaccatccttttactctctatctccatgagttcatttgttataatttttagcttccacaaataagtgagaatatgtgaagtttgtctttctatgcctggcctatttcacttaacataaggactttcagtttcatctatgttggtgcaaataatagcatctcattgtttttatggctgaagaatactatattatgtatatgtacaacattttctgtatccattcacctgttgctagatacttaggtggcttcccaatcttacctattgtaaatactgctgcaacaaacatggtagtgtagatatttcttccatatactgattccatttctttggggtatatacctatgaaaaagattgctgcattgtatggtagctctatttttaggtttttgagaaacctccaactgttctccatagtggttttactaatttacattcccactaacagcgtacaagggttcccttttcttcatatccttgccagcatttcttattttggcttttggttaaaagccattttaactggggtgaaatgatatctcactgtattttttagttgcatttccctgattatcagtgatgttgaacaccttttcatatacctgtttgccattggtatgttttcttttgcaaaatgtctattcagacattttacccattttttaatcagattattagatttttttcctgtagagttgtttgagctccttatatattctggttattaatcccttgtcagatgggtagtttgcaaatattttctcccattctgtgcattgtgtcttcactttgttgattgtttcctttgctgtgctgaagatttttaacttgatgtgatcccatttgtccatttttgctttggttgtctgtccttgtggggtattattcaagaaacctttgcccagtccagtatcctggagaatttccttaatgtttgctttcagtagtttcatagtttaaggtcttagatttaagtttttaatccatttttatttgatttttgtatatagcaagaaatagggggtctagtttcattcttttgcatatggatatccggttttcctagcaccatttattaacgagactgctctttcccccactgtatgttctttgcaccttttcccaaaacttagttcactatagatgtacggatttaactctgggctctctattctgctctgctgatctatgtgtctgtttttatgccggtaccatgctgttttggttactatagcttagtagtataaagtcaggtaatgtgattcttctaattctgttgtttttgtttggaaaagctttgattcttctgggtcttttatggttccttataaattttaagatttttttatatttctgtaaagaatatcattgttattttgataggggttccactgaatgtgtagattgccttgggtagtatgggcattttaacagtattgattcttccaattcatgaacatggaatatctttgctttttttgtatcttatttaatttcttacatcagctgttttatagtttttactataaagatcttccacttctttcattacattaattcctagatattttattttatttctagctattataaatggaattacttgttacatttctttttcagattgttcactgttggtatataaaaatgctactgattattgtatgttgattttgtatcctgcatctttactgaataattttctgtgctgtactgaataatttgctgtagtctttaggtatttccaaatataagataacataatctgcaaacaaagataatttgacttcttcctttccaatttggatgcgcttggtttctttcccttgtctgattgctctagctaggtgaaagtagacatccttgtcttgttacagatcttagagtgaagactttcagtttctctcaattcaatatgatgcctgctatgggtctgccatacatggcttttattatgttgaggtatgttccttctatacccagctttcttagggtttttatcataaagggatgttgaatattatcaaatgctttttcagcatcaatagaaatggccatatggtttttaaccttcattctgttcatctgatgtatcccattgattgatttgcatatgttgaaccatccttgcatcccaggggtaaatctcacttggtcatgatgaatgatcttttcaatgtgttgtttaatttggtttgctaatattttgttgaggattttttcatcaatattcatcagagatattggcctgtaattttcttcttttgctgtgtctttgtctggttttggtatcagagtaatactggcttcacagaatgagtttggaagtatttcttcctcctctatttttcagaatagtttaagtaggattgatactagttcttctttaaatgtttggtagaactcagcagtgaagccatgaggtcccaggcttttttttgtttttttctgggtaactttgcattaatgcttcaatcttgtaatcttgttacttgttactagtccgttcaggttttggatttcttcatggttgactcttggtaggttgcatgtgtccaggaatttgttcatttcttctttattttccaatgtattgatatatagttgctcttagtacctgctaatgatactttgaatttctgtggtatcagttgtaaggtctactttttcatctctgattttatttgagtcttccctctttttttttcattaatctcactaaagattggtcaatgttgtttatttttacaaaaaaaatcaactttttgttttgttgatttttgtactgttttcttcattttgaattcatttatttctgctctgatccttattatttcttttcttctactaattttgcatttggtttgctcctgcttttgtttctttggtctttaagatatattgttagattgttgatttgaagtctttcttcttttttaatgtaggaacttatagccataaaatgaaggtgatttttctctgctagtatgatttaatttcttgctttttattctttctgtatccattatatgttttttgatttagggtgccatgaggcttgcaaatactgtcttataacccattatcttaagctgataacaacttaacattgtttgcataaacaaacaagcaaaaagaaaactaataaaaactccacattttaactccatccctctgctttttaactttttgtttctatttatatcttctactgtccatgtcttgaaaagttgttgtagttattatttttattggttcactttttagtctttctgcttaagataagagtagtttacacaccacagttacactgttataatatgctgtgtttttctgtgtacttaccataaccagtaagttttggaccttcggatgatttcttattgttcattaatgtcattttcttcagatgggagtagtccctttaatacttcttgtaggataggtctggtgttgatgaaatccctcagcttttgtttctctgagaaagactttatttctccttcatgcttgaagaatatttttgccagatatactactctaggataattttttttccttaagtaatttaagtatgtcatgctatgctctcctggcctgtaagatttccactgtaaagtctcctgccagacatattggggctccattgtatgtgatttgtttcttttatcttgctgcttttaagattccttcttttatttttattatactttaaattttagggtacatgtgcacaacatgcaggttagttacatatgtatacacgtgccatgttggtgtgctgcacccattaactcgtcattagcattaggtatatctcctaatgctatccgtccccactcccaccccccagcaacaggccctggtgtgtgatgttccctttcctgtgtccatgtgttctcattgttcaattcccacctatgagtgagaacatgtggtatttggttttttgtccttgaaatagtttgctgagaatgatggtttccagcttcatccatgtccctaccaaggacatgaactcatcattttttatggctgcatagtattccatggtgtacatgtgccacattttcttaatccagtctatcattgttgggcatttgggttggttccaagtctttgctattgtgaatagtgccacaataaacatatttgtgtatgtgtctttatagcagcatgatttataatcctttgggtatatacccagtaatgggatggctggatcaaatggtatttctagttctagaaccctgaggaattgccacactgacttccacaatggttgaactagtttacagtcccaccaacagtgtaaaaatgttcctatttctccacatcctttccagcacctgttgtttcctgacttttaatgatcgccattctaactggtgtgagatggtatctcattgtggttctgatttgcatttctctgatggccagtgataatgagcattttttcatgtgtcttttggctgcatcaatgtcttcttttgagaagtgtctgttcatatcctttgcccactttttgatggggttgtttgttttgttcttgtaaatttgtttgagttcattgtagattctgcatattagccccttgtcagatgagtagattgcaaaaattttctcccattctgtaggttgcctgtttacactgatggtagtttcttttgctgtgcagaagctctttagtttaattagatcccatttgtcaattttggcttttgttgccattgcttttggtgttttagacatgaagtccttgcccatgcctgtgtcctgaatggtattgcctaggttttcttctagggtttttatggttttaagtctaacatttaagtctttaatccatcttgaattaatttttgtataaggtgtaaggaagggatccagtttcagcttcctacatatggctagccagttcccccagcaccatttattaaatagggaatcgtttctgcatttcttgtttttgtcaggtttgtcaaagatcagatggctgtagatatgcggcattatttctgagggctctgttctgttccattggtctatatctctgttttggtaccagtaccatgctgttttggttaatgtagccttgcagtatagtttaaagtcaggtagcgtgatgcctccagctttgttcttttggcttaggattgacttggcaatgcgggctcttttttggttccatatgaactttaaagtagtttttgccaattctgtgaagaaagtcattggtagcttgatggggatggcataaaatctttaaattaccttgggcaatatggccatttacatgatattgattcttcctacccatgagcatggaatgttcttccatttgtttgtatcctcttttatttcattgagccgtggtttgtagttattgaagaggtccttcatgtcccttgtaagttggattcctaggtattttattctctttgaagcaattgtgaatgggagttcactcatgatttggctctctgtttgtctgttattggtgtataagaatgcttgtgatttttgctcatcaattttgtatcctgagactgttgaagttgcctatcagcttaaggagattttgggctgagacaatggagttttctagatatacaatcatgtcatctgcaaacagggaccatttgacttcctcttttcctaattgtataccctttatttccttctcctgcctgattgccctggccagaacttccaacattatgttgaataggagtggtgagagagggcatccctgtcttgtgccagttttcaaagggaatgcttccagtttttgcccattcagtatgatattggctgtgggtttgtcatagatagcttttatcattttgatatacgtcccttcaatacctaatttattgagagtttttagcatgaagtgctgttgaattttgtcaaaggccttttgtgcatctattgagataattatatggtttttgtctttggttctgtttatatgctggattacatttattgatttgcatatgttgaaccagccttgcatcccagggatgaaggccacttgatcatggcggataagctttttgatgtgctgctggatttggtttgccagtattttattgaggatttttgcatcgatgtttatcagggatgttggtctaaaattctctttttttcttgtgtctctgtccggctttggtatcaggatgatgctggcctcataaaatgagttagggaggattccctctttttctgttgattggaatagtttcagaaagtatggtaccagcccctccttgtacctctggtagaattcggctgtgaatccatgtggtcctggattttttttggttggtaagctattaattattgcctcaatttcagatcctgttattggtctattcagagattcaacttcttcctggtttagtcatgggagggtgtatgtgtccaggaatttatccatttcttctagattttctagtgtatttgcataggggtgtttctagtattctctgatggtagtttgtatttctgtgggattggtggtgatatcccctttatcattttttattgtgtctatttgattcttctctcttttcttctttattagtcttgctagcagtctctcaatttttattgatcttttcaaaaaatcagctcctggattcattcattttttatgtctctctttccttcagttctgctctgatcttagttatttcttgccttctgctagcttttgaatgtgtttgctcttgcttctctagttcttttaattgtgatgttagggtgtcaattttagatctttcatgctttctcttgtgggcatttagtgctataaatttccctctacacactgctttaaatgtgtcccagagattctggtatgttgtgtctttgttctcactggtttcaaagaacatctttatttctgccttcatttcgttatgtacccagtagtcattcaggagcagattgttcagtttcgatgtagttgagtggttttaagtgagtttcttaatcttgagttctagtttgattgcactgtggtctgagagacagtttgttataatttctgttcttttacatttgctgaggattgctttacttccaactatgtggtcaattttggtataggtattgtgtggtggtgaaaagaatatattctgttgatttggggtggagagttctgtagatgtctattaggtccacttggtgcagagctgagttcaattcctccatatccttgttaactttctgtctcgttgatctgtctaatgttgtcagtggggtgttagtctcgtattattattgtgtgggagtctaagtctctttgtaggtctctaaggactaagtctctttgtaggtctctaaggacttgctttatgaatctgggtgctcctgtattgggtgcatatatatttaggatagttagctcttcttgttgaattgatccctttaccattatgtaatgggcttctttttctcttttgatctttgttcatttaaagtctgttttatcagagaccaggattgcaactgctgcttttttttgtgctttccatttgcttggtagatctttctccatccctttattttgagcctatgtgtgtctctgcacatgagatgggtttcctgaatacagcacactgatgggtcttgactctttatccaatttgccagtctgtgtcttttaattggagcattttagcccatttacatttaaggttaatattgttatgtgtgaatttgatcctgtcattatgatgttagctggttattttgctcattagttgatgcagtttcttcctagcctcgatggtctttacaatttgtcatgtctttgcagtggctggtcccagtttttcctttccatgtttagtgcttccttcaggagctcttttagggcaggcctggcggtgacaaaatctctcagcatttgcttctctgtaaaggattttatttctccttcatttatgaagcttagtttggctggatatgaaattctgggttaaaaaatcttttctttaagaatgttgaatattggcccccactctcttctggcttgtagagtttctgctgagagatcagctgttagtctgatgggctttcctttatgggtaacctgacctttctctctggctgcccttaacattttttccttcatttcaactttggtgaatctgacaattatgtgtcttggacttgctcttctcgtggagtatctttgtggtgttctctgtatttcctgaatttgaatgttggcctgccttgctagattggggaagttctcctggataatatcctgcagagggttttcctacttgggtccgttctccccgtcactttcaggtacgccaatcagacgtagatttggtcttttcacatagtcccatatttcttggaggctttgttcgtttctttttactcttttttctctaaacttctcttctcacttcatttcattcatttgatcttccatcactgataccctttcttccagttgatcgaatcggctactgaggcttgtgcattcatcacgtagttctcttgccatggttttcagctccatcaggtcctttaaggacttctctgcattggttattctagttagccattcatctaattttttttttgaaggtttttaacttctttgccatgggttcgaacttcctcctttagctcggagtagtttgatcgtctgaagacttcttctctcaacttgtcaaagtcattctccttccagctttgttccgtttctggtgaagagctgcgttccttcgaaggaggagaggtgctctgatttttagagtttctggtttttctgctctgttttttacccatctttgtggttgtatctacctttggtctttgatgatggtgacgtacagatggggttttggtgtgggtgtcctttctgtttgttagttttccttctaacagtcaggaccctcagctacaggtctgttggagtttgctggaggtccactccagaccctgtttgcctgggtatcagcagtggaggctgcagaacagcagatattggtgaacagcaaatgttgcttcctgatcattcctccagaagttttgtctcagaggagtaccctgccgtgtgaggtgtcagtctgcccctactggggggtgcttccaagttaggctactcaggggtcagggacccacttgaggaggcagtctgtccgttctcagatctccagctgcgtgctgggagaacaactactctcttcgaagctgtcagacagggacatttaagtctgcagaggattctgctgccttttgtttggctatgccctgcccccagaagtggagtctacaaaggcaggcaggcctccttgagctgcagtgagctccacccagttcgagcttcccagctgctttgtttacctactcaagcctcagcagtggtgggtgcccttcccccagcctcactgctgccttgcagtttgatcttagactgctgtgctagcaatgagcgaggctctgtgggcgtaggaccctccaagccatgcgcgggatataatctcctggtgtgtcgtttgctaagaccattggaaaagcgcagtattaggttgggagtgacccgattttccaggtgccatctgtcacccctttctttgactaggaaagggaattccctgaccccttgtgcttcccgggtgaggcgatgcctcgccctgcttcggctcatgctcggtgcactgcacccactgtcctgcatccactttctgacactccccagtgagatgaacctggtacctcagttggaaatgcagaaatcacccatcttctgcatcactcacactgggagctgtagactggagctgttcctatttggccatcttgctatttctctcaagattctttctttattattgactttcataagtttgattattaaatgccttgaggtagtcttctttggattaaatctgtttggtgttctacaaccttcttgtgcttgaatattaatatgtttccttagatttgggaagttctgttagccctttgaaaaaactatctacacgtatctcttcctctatcacttttaaggccaatataacttttagatttgcccttttgaaaccattttctagatcctgtaggtgtgctttattcttttttattctttttttcttttgtcccctctgatggtgtattttcaaatattctgtcttcaagctcactaattctttcttttgcctgatcaattctgctattaaagactctgatgaatccttcagtatgtcaattgcatttttcaactccagaatttctgcttgattccttttaattatttcaaactcttcttaaaatttatctgatagaattctgaattccttctctgtgttatcctgatttcttggagtttcctcaaaacaggtattttgaattccctgaaatgtcacctatctctgtttctccaggattggtccctggtaccttatttagtccatttagtgaggtcatgttttccagtatagtcctgagtcttcatctgtctcttaattaaatagttaagtatttattatagcttcacaatctgggcttgtttctacccatcctccttgggaaggcctttcaggtatttggaagaacttgactgttgtgatctaactgtatctgcattaagggtcatccaaagcccaataacactgtggttcttacagacttgtagaggtaccacgttgatggtcttgaataagacctggaagaattttctggattacaaggcagaaactcttgttgtcttcccttactttctcccaacaagaggaatctctctccctctccctctctctctctctctctctctctctctctctctctctctgtctctgtctctgtctctgtctctctgttcagagctgtctggagctgggggtggagtaacacaggcacccctgtggccaccaccactgagactgcactgggtcagacatgaagccagcacagcagtgggtctcacacaagcctagtgtaactactacctggctactgcctatgtgcgctcaaggccctggagctctaaaatcagcaggtggcaatggcagccaggtttgtatccttcctttcagagtaatgagttcccccaggcccttggtgggtccagagatactgtctggaagccatggactggagtcaaaaaccttagaaatctacctggtgttctgctgtattgcagctgagctggcactcaaaccatgggacacagtacttcccactctaattttccctttccataggcaggggtaggaagagggggaaatggccacaccatggccactacaactactgatccacgggaagtattgccaggctaccactagcatttccttaaagtccaagggctcttcagcagcttgtgatgaatgctgcctggtctgggaatcacccttccaagtactgggctcccctctagcccagggcagatccagaaatgctgtccaagagccaaggcctggaatcagggaccccaagaacccacttggttctctactcccctgtagctgagctggtacataaggtgcaagataaagtcctattactttcccctctgcttttctcaagcagaaggaacctctccccataatcactcccaatgagaatatgctgagtctcgcctgaagccaacaagtttcagagtgtcacccaaggttcattgcatactacctagatattgctactggttattcatggcccaagggctctttagtcagcagttgatgggtcctgccaggactgggactgggtccttcccttcaaggcagagattcccttctggcccagggtgtgtctagaaatgtcatctgagagctgggtcctgcaaagcgggactcaaaactctgactggtgccctatcctactggacttttgattttgatatttgataatggctgaatatttctcaaacgtgatgataactataaaattacaaatccaacaagttgaacaaaccccaaataggataaagtttgtaactgaaaaaaatgttggcatagcaagcaagatcaacatcacatgaaaaagacactaaagcaatattattgctagaaataaggaggcttacaactctgataaaaattacaatccataaggaaatctaaaattttcatgcatctaaggacatagcctcataataagtataaataaatttacagaattataaaaccacaattttgatggaaagttagaattgctttctgattaattacaaggtcaagcatatgaaaatttaagcatttagaaagacatgaataatacatttagcaagcttgatgaaatggacacacagagaacccaccacccaaattagagaataggtattctctttaagcacacaccaaaatttacaaaattttccatgcactagacataaacaaatcttcataaatctaaataattggtatcataccaaccaatttagagtgattaaattattgatgataaaaagataactttttaaaaatctcatacatttaggaatatttttaaaactttaaataggtcaaaaaaggataatagaaactgaaaatatttagcacaaaaaatgaaaatgctacatatcaaattgcaaaccatggtagaaaaattaatgcctgaaatttccatattatgaaagaagatgacataattaatatacaaaaaacctagtacaatagttgaaaaataataagaaatttaaaaaacaaactaatgaactagaggaaaaaataaaaggtaaataattcattttctaaaaagacacaaaccaaacttactcctggcaaaattcatcatgtaaagaaagattagatactgtagaggttaacaagagatccaaaatattatgtacaacttcaggtcaacaattttgaaagctttaggttacctgaccaatgtcttaaagacatacaatttatcacatttgattcaagaaaaagaaaagccaaatggtcactaaagagccaagaagcctgatatccaataagagatcacagccattaaagaaaatagaatgaatagctaaaaaatctctcagtcccgatcccttctgcacataccaatgcaatttttcagatgagttctatgtttaaggaacagataacatcactgttaaactgtgctagaacaggaaataacacttccaattcatatttaaaattaacataatcttgaagtcaaaaccagacaagcacagtaagagagaaaaactaaattacagctagacaggaggaataagtttcaatattctatagcaccgtaagatgactattgttaacaataatatattatacagtttcaaatagctagaaagaggatattgaatgttcccaacacatagaaatgataaatgtttgagatgatggatatgctgattaccctgatctcatcaccatatgtattgcatatgtattgcaacatcactatgcacaccagaaatatatataattattacgtgtcaagtagaaaaaaaatttttttaaacttggtcatctatctttctagtggccatagatggataatatgaaataaaatgataacaaaaaccatcagtttagagcagggatcagcaactgctactcccatgcccattttggccagcagagtctgtttttaaatggcctacaggctaagaatttttctcttatttttaaagatttgtttagaagaagtaaaacaagctacagagaacaactagtgcctataaagcctaaaatttttactatgtagccttcacagtaaaaattaacccgaattagagaaaaattttaaaattaatctaatacacttggtgtccttgtaaaaatggggaatttggatacagagacaggaacacacgtagaacaccatgtaaacatgaaagcagatattggggtgatgcttccacaagccaaggaatactagagactgccagcaaaccaccagcaaccagggaagaagcatggaacagatgcttcctcacagcccccagaaggaaccgatcctaccatcaccttgatttcagacttcgagcctccagaactgagacaatagatgtattctctttaagtcacttgttttggggcactttgttatggcagccctagaaagtgagcatacatttctttatcaataagaaatgaggcagtgtattagagaacaatggaggatctgcctagataaaatggtaacagaaaatcttcctgtaaatggctaatttgggttgaatgggaaggataagaaagatccagtcataccaagagtttggggcagaacattccagggagagagaataatgtggccaatccagttaaggtagggaaaggtttatttaaaactgattaaatggaatgataattaggaagtggaggagaggtgatgatatagattcttcagccttttgaaggataaatgattagcaaaaacagaacacacaaagtcaaatttgtccacaaaagttttgaagtcaccaaagccatgctcatggtataggatcctctgataactctcagagacaacttgccatgctcaaagtattgtcctcatagggaatatgctacaatcaccatttccggggatatcagaataataaaatcgcaaattcattagaaagtttcgaagccccaatcttttctccaaagtcttctttttttcttacacaaacacaattttattgtcacaccttagaagatttaccataattcaacgcattctaatattcagtccatatttaaacttctccacttttccaagtgtgtcttttacagattttttaatggaataaagatccagtcaaggtgttcatattgactttgagtatgtttctttagaactctctcccgtctgttttttgacaatggagattattttattcaagctattatagtagagatagcattcattaatgagaagcatctcaagtaaaagaccaggggacttggggctttttaaaggcaggtacaaaaaggagtcatattcactgagaaaggtagaagtcagccatatgtaggaacatgtgagagcagggtagcccattgtagttggtcagttctagaaacttagaagcataaagagatttctctgctatcgctgcattttagggaatacagcattcagattaaattcaacattatcacatttaaaaagaattcatctagaatattatatattgtatgatcaaatagttctgtttttatcatatggatacagagagtgttcagttatcctaatgctatttatcactatggaggtccatccttcctccatcagtttctcaattttccattctatttcattggactgtttgtctacccttgagttaatacattgtgtttaattattatagctttataaaatctgttacacatgtgcttaaaaaaagtatccaattgttgagtgctgagttatcaaagtattctttacaacatctctgataaggtatcctcactgtctaaatattctctgtgtgctcagcatctcaaagcacagcccattctctttctcagctctaacttaaaaagtccattttgaataggtaatctaggcatatggcacaatacttaaaagccaaaaaaaatggtttacagtgaaaattaagtttccctccttccttgcccctcaccaaatagtttcccttaccagagacaatcactcttaccagcaaacttcatgcatttataaacatacatgtaaattttatttttgcaacacaatacgagcaactatagatacatttctgccccttgatttctcccttgtaatttccatattggtggaacagaactgttcattcctttttaacaggtatatgtatcgttttctaccatggttctaatttattgctagattctctctttactgggttgagctgtgcatctctgtactttttcttccccgtttgtcttttcttttcttgaaaatgaggctaatttcatttgcactctgttgacctcctacatgaaggaaatttccctacagtaactggagggtgacaaagtgctctgttgccataaacatctgcaaaagatggtgaattctagaaggcaggatggcatattggtcaagaatacatatttcccaagattaagtctttactctgccatttacagataagtgaccttgaataagttactcaaactctgtcctctcaattacctcaactataaaatgggaataaaaatagcatctgtgtaaatagggttgttgagtggattaaaaacatattagtcaaacgcctagcacatgctaagagttcagtccatgttaatcattgttgttgttcctatcatcattatcccccccttccttagacaataaagatcatcttcccaagacctcttcgccaaagttctgaaagacaaacagcggtaaaaagaaaccccactctcagcttgcatttttgttgtctgaaccttattccctaggttctgggggataaccttatgtgtgtgttttcttatgaaggaaagatggcaggatctgtctgccctccaaaactcagcctgctagcttgtttttcagatgttatgctgattgcctgcttaccttgatctgtgtcaggaacacagttgacctttatctgggtcaggggagtgtaattggactggcaactctctttacatggaatccctctgtgatggttaattttatgtatcaatttgactagactacaggatgcccaggtatccggttaaacatgatttctgggtgtatctgtgagagtgtttccagaagagattaacatttgaactggtggacagagtaaagcagatggctgtccccagtgtgggtgggctttatacaatctgttgaggaccaaaagagaacacaaaagtggaggaagggagaactcactctctctgcctgatgccttgagctaggccatgggtctcctgcccttggactaggatgtacattattggttctgctggttctgaggccttagggcttggaaccactggctttcccccatctccagcttgcagatgacagattgcaggacctcttggcctccatcattgtgtgagccgattccttatagtaaatataaatatgcacacacatacatatcttcttggttctgtttctctggagaaccctgactaataccctctccaccctaaatctggagccggctgctcacacacataaacagcagtcaaacacagacaagataacaagagcctctggggcactaggggccactgcccacaccgtgtaaatgctcttaagtgcctcacatttcactgtacctggggccctggcaggcaggcggcgagacaggtttctggctctggagaatgtgggttagtcttggtggcccttccaggtgagcgtgacccagttagtgtagtaacccagaaatgtccacatgcgtgtgccaaacctgaaattaacagcattctgggcagctctggttcaatttctaaaatgagcagacagcttaaaacctcagtgatgatctaaatagcttctttaagacacacttaattcagatttaacaagacaattaaatttaacaagatgttgttaaatacaagtgattgtttaatgtggatacgctgaggagctgccatgcaggagacacacattattattaattactgctaaattatttttgtcatcagcacataaatttcaacatttcttatcagattagtatacttcatgtgcagaatcctaaaaatgatacataaacaatgatatatagtctttaaagctcttctttctccaacaaggagaataaaagcaaacacatgtaatatatagacacatacaatgtgccaagcactattctaaacacgtcacaaatttagttgacccttgaatagcacaggtttgagctgcacgggtccatgtatgcacagcttttttttggccaaatacaaattgaaaatacaatatttgagggaacccatgtatctggaaggccattttttggtacacataattctgcaatactgacagcaggactttggtatgaatggattttggtggtggggggttactgaaaccaatctcttgcatatatgcagggacagctgtaatccaactagccttcacaataacatcatgaggtgctactgttttttatttctattttatttataaggaaaagtgagtcataagatgcacacatatcccaaggtccaacagttgtgaagtaatggaaccaagatttgaactcaaaatgactgaatctggagctcacagtccccactgtgatcatactctctgcaagatgattgcaaatttgcaaatgtgtagttttcaaactccagtctagtttgatactaaagggacatgggtctttggatctatatgaacctgggttagaatcctaatttaccagctatatgactatgggctcataagcctgttttccccctctggaaaatgtcagtactcatccattctcacatgtaagataatgcacgtgaagatcctagcacaggagctgacacatagtatgaactcaagttcatttattagatatttatagaacactctctatattccaccccagaagtagacactgaggaacaaatgatgaacaaaacagtacaacatagttcatctatttatcacatacacacatatgagtatacaattgagaccagacaactgctgagaaggagaagtgcatactacaataagactgcaaaaaggggactttgacaaagatgaaaaatgtttcctaaggaagtgatgactacacaacacacaaccctcatcccttatagaagtagctatttggccaaatagatctgcttatctctatgtatgggtgcaagggtaggacatttgacttagttttgtttttgttttgtatttttgcactgaatctgctctggaacacaggaggacatcagggcacagtaactccagttccagtcaggaactggagtcagaaatttgatttctgcctccccatgaatcctacaggggcaacgttgaaaaaaaaaatctgtgttgacctcctctagcatagtctctgacatctaagaggcactcaataaataccagttaaataaataacaaatataaatcatggggaaaagattctgagattgcatagcacctcacattatccagagctctttctcagtattaattaaggagagtttagtggtaggaccaccaggtttaaattattctaccaagtacaagctatgtgaccttgaacaagtaacctctttttatttattttatttttttgagatggagtcttgctctgtcacccaggctggagtacagtggtatgatcttggctcactgcaacctccacctccggggttccaatgattctcctgcctcaggctcccaagaagctgggattacaggcatgcaccaccacgcccggctaatttttgtatttttagtagggacggggtttcaccatgttggccaagctggtcttgaactcctgaccttgtgatctgccctcctcagcctcccaaagtgctgggattacaggtgtgagccgccgtgcctggcccaagtagcctcttcctatgcctcagttgatgcctctaaaaagtaggttacaatgaagcttaaatcaaataatgtgtaaagcatttagcacagttcctggtacgtgataatcttcatggcaatgttaactggggtagtggtcaacagcagtgatagtgtggtttcttaatccatatagcacaacctaaacagttgatgacaacatcctccttcaacaaaaaggaaaaaaactgaggtttagagatctaaagttatatagctagtcaagcccaggtcagctggttccaagcccaccatgccaagtgagccaacagaagccttttgaacaggagcatgtcacggagaaagcccatgatagcaaaagtctgcccagggagcatgtgcaggagagtgagttcagctggaagtaactccttccttctgagcaagcagctgacaaccttatgttgtcccccaattatctcccctcctgcctttttctggaatggggatgggggatgaagaatcgtgaaactgaagagaaacctcccacttgagctcagcaagagaaagatgagaagaagccagacaaaagcatccccacacacactctgatactttgaatcctgacacagcagcggttgcaagtctgaaaccaagctgccccctaatgtacagtctccacattcaggaggctgaagccattagcaactaactttaggctggaagaaatggaaaagaactcaagtgccttaagcagtaggtatcaggctctccatgtgaacttagcagtgtcccttaccatgcattttgaacttgtctaagtcagggtttctccccttcagttctactgatgttttgttggggagatgactggtgggaaatgttctgtgcattcaccatagatgtttaacaatatcgcaggcattgtctcatctagatatcggtagacttccccaggtgcgacaaccaaaaatgcctctagacattgccaaatgtcctctgggggacaaaattgcttccagttgagaaccactgatataggttggcttgaaaacaggcaatggttttaagttaggcgtgttcttgattttttcctcaggtaatgtcagcttacaaattctttacaaattgggacaaatcaggaagcccttagcccatcccgttgactactgtggaagaaggcagtcatgaggtggtcatcttcctcagcttatgttaggcttttatgccccatctatatttttaggaaattgtttctccgcacctaatgtgaactggtattaaccatttccagagaggcaatctgaagggaaaagttgtcgcagaaatcccttcaacgtctcaaccaacacctctacagacacagctggaagactgcagcagatcaatgggaactctactatgctggcaaacgttcatcttgaccatcatgtttgctgcctgcatccgataaatatttcttgggaagatcttctttgctaggcattatgctagatgaggtgggagatgctaagatgaagaaggcattgttcccacctccagagcttcccaatctgtttcgaagaaccgtgtgggaaggatcacgtaaacctcttttaactaagctcaaagcctgaacttggaatccaggtttcgattctgtctcattaactggtgaacttgggcttggcctgtatattgctagaggtccaggtgagtggttgagctcttcctaggcattgatttgagttagaactcctgtcgtctttacctggatacctgatttgggggagaatgggttcagaagaacaaagtagtcatgcatttaatacatttttattaagcactgctatgttcaagactgtgctactctggatataggaatgataaagcatattcaatccattccctcatggagtttgccctctaattggaaagatagacattagatggaatttgcacaaaataaatatgtgattgccattttgtagtaagagctgcaaaggaaaaatcagacatctcccagtcactcagcctggctgtagtctgaggctgaaggtgataggtgatacaaggagaggctaatggagctgtttacctggaggacttcgtgagagatgagcataagtaaaggcactgcaggatcaataagacagagtggaacaataagttgcagagagggacagtatctgcagtatttctataaagtagcgtcattttagccccagtagggtttgtgtctttggaagcttcgtggacagagaatcagtgttcacagaggaccctggcagctggaatgttggatgaatacatcgttagtggattcctgggccacagatatcaaggaggaggccaaagttgcatcagtgtatgtgaaactccacaaagagctcctgaaaataactctaggagattttgagggctggcaaggattctacagcatgtcaaagggaccaagagccagcaaacagtacattacaaacctatttaataagaagcaaaagaaagacctgggtggaagggccctgcagggcttcaaatgaaagggaaatttcaaagcttcctggaagagtaggcctatacctcagccttgaagtatggatgttttaaatgtgtttcttaagctgatgtcattcttcccaaatcacagctagaaaatactttctgctcagactcagcaaacactgagaagcaaaggggaatggcctatctctgtggaatccagtgaagaaagaaaccaattatattagccaaatcccatataagtggagactattaaacaagatccaagattctcccctggcaagaatatactgcctataatttatcagtctgcaaatatttattcagcatgcactttgtacaaaacactgtagttagaactccagattataaccctaacaatggctaacgttaatggatcaaattccacctataccacactttagctgtttaacaaaggacaagtttctgacttctctgcttttcaatggtcacatttgtaaactctttgcacttagtaaatgctacagtaattattactattatcattatgattcttgtaatcatcattataagccagacagtattacaggatttcatttaattttaataagattgacatttttattatttccattttatagatgaggaaactgaggcttagagagattaagcaactaatcgaagttgtttagctactaagttgcagaaccaggatttaaaccgaggtgtggactccaagttcatactttactaccctgaaatgacagaattatataaaataatgtatatgaagtaccagccaagattatgacactcaataaatgacagcctttcttgctgctgcttagcttctggtgatggccggctacccttggtgttccttagcttgcagacttgtaactccaatggtgcccattttccttcttaaatgatatgaagaatatgcaacatttggttcagtaactggcactgagtgctccaactcaaaattccttgttacaactggtaaagactgaggttcaaattcctaatcaggaaacttttcatcttgaatggatgagaactatgagtgaatccatcaattttaaggaagaaggaaaattattttctccagaactctaatacgctgagaactctaaatgctgccaggctgcagaaagctgtgcactccagaaccttctagcttctaccctatttccccatttggccattcttcctcctaagttacctgtttttccccaagtgtcaggtgctagcattcatgaatggcaaaattcagactgtaaatgttcatctgaatccagtcatccattgatttttaagttcatactgaagtggtgttgagaattagaagaaacatgctctctcgccctcaaataagcacttttcataccaatgtcagcaaagcaaacatcagcattaattaacagtgactttgaactgtgtaatgttttccattagaactgaagagggctagaaggaggaggacaagggacaacacatggcgtcaccaggtatctggggaaaagggaactaaatttataatgcagaagtagactgctgcttgcttaaaaatagaagggacatgttttgaaacctcaagtggttgatggtggagacggttaaatcagatgactaatctcccagtgtgccacgttgtccctgctcagagggcagttacatggtggaggacactgcaaatggcacagacattgtagccttggaaagatgtggggaagtgttctgagtccgaggacttctttttactcatttgagacacatttttaaaacacaaacctgaaaaaaaaaatcagcttttgatacagcctatcaccctgtgatggatttccatttcactaacgatgaaacagtcttttcatggctgggcgtggtggcttaggcctgtaatcccagtactttgggaagccgggcaggtggatcatctgaggtcaggagttcaagaccagcctggctaacatggtgaaaccccatctcgaataaaagtacaaaaattagctgggcatggtagcacatccctgcaatcacagctacttgggaggctgaggcacaagaattgcttgaaacccgggaggcagaggttgcagtgagctgagatcataccattggactccagcctgggtgacagagtaagcctttgcctcaaaaaaaaaaaaaaaaaaaaaaaatagagaaaaagtcttttccttgacccatgtattagtttcctagggctgccatgacacatcaccacattttgtggctttaagcaacagaaatgtatttgttcacagttctggcagttagaagtctgaaatcagagtcagccgggccattctctcttcgaagggtctaggagagaggagcctttcttgctgctacttagcttctggtgatggccggcaaccctcagtgttccttagattgtagacttgtaactccaacctctacctctgtcttcatggggccttcttccctgtctgtctctgtctttgtctctgcatctgttttctcttcttgaaaggtcacaagtcattgggttagggcccactctactccagtataatttcatcttaactacatctgtgaagacactatttctaaataaggttatatttggtcattccaggtggacttgaattttaggaagacgttttccaacccaatataacccccttcccttccccaacttcaccagctgagctctagccacagtggagtcccctcagttctctgaacatgtcaaactctctttcccaccttagtccctttgaacttccaagtcctctctgtctagaaatgcaccctcaccctccccaacctcctcagctcttggcttgactggatccttctcacccttcaagtcttggtttaaatgtcaccacctcaaagaaaccttcccttgcccaccttatctaagctccttgttttcattatctcttctccatttccacacttgtttcttttctctttttttttttttttctttttttcttttcttttctttgcatgacagggtcttggtatgttgcccaggctggtctcgaactcctgggctcaagcgattctcctgcctcagtctcccaagtagctcagatgacaggcatgtgtcaccatgcacagcttcttttcttgtatttagcatcaaatttagtaccatgttaatgctttctctctctctgtgtgtttgtgtttgtgcattttcttagctttctcattaaaatgtaggtttgaacaccagcagttccactagtttgttccctcctagtttgttcacacagcatcttatgcagtccctctactaaatgaatagttgtttagtaaaacaaaaagatttgagtatctgttatatgaaaggccaaatgctaggcacttagggaacatggaatatataaaatatagcccctactttcaaagtacttagactggaggcaagatcggcagtggaaacaaatcattctgagatgtgatgtaagttcaagaagagagagactgaaaaagtgctgcagaagcaactcacaataaacaatttagcaaagctagtggtctcgggagtggaggaacacaggtggggataaacttgcaaagctgctttcagagcaaaaggggagctggtactgatgcaaaaagtgagagtaattcgttgtgcatgcatccataggtaacctccagggcccttgctgtatctgtgggccggacacagtggagccacgtgcagtgggtatctgagcccagctgttgtagcaggcaaggcaatcagggaagatgcagccaaggatgcctttcccagccaggggttcctgggccctggtttctccacaggctttgaaactagatgtgattagtgagttctgaaaccccctgacaactcagggggagattttgctgtccacccttgggtgcccccaagcagctggaacagattgtatgtggaagttttctctagattcctgcctccttccctacagttcccaccctaagaagattgccgtttaagctccaggttaaagaaaatcctgatattcctggggcaaactgcactcaatttgtttctctaacagacagctggcttggaagagccaccttttctccctttcctccccctcctctggattcccttcttgtcctccaagtgcaggtgggaggtacctgtgtgaggagtccactctcaagatcctcccttcccataagagtctataatagacaagacgtcagaggggaagggaatcagttgtggtgcaacaaatattaaaaggaaacttttctctgcaatttgctgattagaatcaaatgccctcctggaggaatgagatcctttggaagggcgcgaccagcttgtaaatgtgtggcaagaagacaatactaccgctgggggtcctagggatgtgatgggccttgtaccctgaatgcatctgggaaagaactcatttagaaggcactatttttgaaggttgagagatagaatacaaagaaagtgcttagcacagtggctgctacttgcacacaaccagttactgtcagctactgttacccttcctactactattatcaatgttaatgttttcacaacgttcgtagtaagtggaactctccatagcttcttggacaagattgagccctttttaaatacttgctgatgtattggctaaagggacttggagagggtgatggagacaaggaagatgtggatagctggaaaagagagttctcagggaaagagggagaagtagcggtggccatggagaatggaatgtgaatggtaaattcttaagaatgctttgtggtatgatatacataagggtgtcctccatatctgtttttactctaaatatacatcaattgttaaagttcttagagttggtgtggtgaggtcactaaatgtggtgacagtaaagcctggcctcaacgtggggtctgaactcagggggcagaatgacccccagtcacacctgtagtacaagtgaggactgtgtttattttctagggctgccatataaattaccacaaacttgttggctaaaacaacagaaatgcattctcttacatttctgcttgccagaagtctaaaatctcacagagccatgcttcctctgggggctgtaggggagaatccattatttgactcttctagcttctggtggctgctggcattccttgagttgtgaccacatcacatcagtctctgtttctgtggtcgcgttgccttttactggatctcaaatctccctctgcctttctcttataaggacacttgtcattggatttaggacccacctgaataatctaggatgatcctctcaactcaaaagcctgaagttaatcacatctgcaaagacccttttcccaaattaaaaaaaaaaaattcataggttccaaagattggcacatggacatatctctttaggggccactattctcacccctattcattgtgactatcctggagctcagaaatgagtgaattgctgcaagtctcagtgctagaaaacaaaggggccaggtacagaaaccttaggacagagatgggaaatgacttacccaagagagtacagtagacaccaatctgagtcaagacttctctctactccagtcttcaatggttttacccatatgcatgataatgtgggaatttcctataatgttgggaagatattcttgtctaggtagctgtgaaactttaagaaagatattttgcaattgagatatcctgtttgagactcagctcaagatattctttttcttttgattaaggattttttttgaaaagatggtttgtaaaaagataaatgaaatagcttatgtaccataccaatgctgaaatggaaggataatttccatttatcatggacctccaaccttacagtcagtgagaagcatttatctttttacacattcttccacttattcattcaacaaatattaagggtactctgccaggcagtgtgcatagtgctggggagacaataaataagtgagacaaatgcatttcttgcatttgtggaatataatacaatatggaggaaacagacaacaacaataacaataaagagtgctattttgaaatttggaaattgctattaatgaaataaacattgtgctatgagagagtatattggcaatgatactactttaagtagaggaataagaaaaggtctgtgaaatttagatgagacttgaaggaatccattgggcaaagaggctggagaaggcatttcattccaaacaaaatgccttaagaggcaaggagtttgatgtttttagaatagtcagaagacccacgtagccagaacttacaactgggtgggaaaagtgaggcttcctctgttgcaaaaaggcttcctccatgtgccaaaatgtaccaccacagtttactccaggattatctcatcccagcccagtgatgacaaatcaaagaacttctatcttctcctgttttctaaattctaaatccctaaaaagactttgattggctttggtttaagtcaagtgacttcacttgaaacaatcactgtggccagaggaatgcaattctaagaaaagccggacctggattgcctaccttccgctgtggtcagcagccccatcagaatcacatgattggagcagcaggaaatcagttgtccagaggaaacaggggatgcaggacagacaaggcagtagacattcaccatcctgctcaaaatgcagcaattcattaactgctcccctgatccttacaagcagcgacattgtctgtctaattcattactgtgttcctcatgctgaggacagttcctaggacatattagctcctcaaaaactgtcaattatatgtgtgggatacattaaaagaatgacattttattaccataaaaaaattacagtcacatgtcaatgacagggaaacattctgagaaatatgtttttagacaatttatcctgtactaacatcacagagtgtacttacacaaacctagatggtatagtttactagacacctaggctatatagtacagcgtagtgctcctaggctacaagcctgtacagcatgttcctctattgaatactgtaggtaattgtaagacaatggtatttgtgtatctaaatacagaaaaaatacagtgaaaagatactatgaaaaaacatttttaatggtacacttgcattagggtgcttaccatgaatggagcttacaagactagaaattgctccaggtgagtcagtgaatgagtggtgagtgaatgtgaaggcctagaacattactgtgtactactgttgactttataaataccatacacttaggctacactaagtttctaaacaaataaagtaattgcaatacaatgttgtgacagccatgatgtcggcattaggtgacagaaatttttcactccattgtaaccttacaggactaccatcgcatacacgatccattgttgatcaagatgttatttagcgtatgactgtatttacaatataaatacttcataatggatagttaaattctgttacaccacacaattgttgaagagtgttggtctacagagtggaaatactaacgcttaagctgcattacttgccaggcttctctgataattaagtgctattcgattgtaaaaggctttggaacatattaaaataaaaatacatacagacacaaggcattttattgttaatagtcagctaggaaatgcatgctcagcagaattgtctaaataggctcctaaagagtatggcaaaaaaaaaaaaaatggaactttgaagagaaagtttcaaatggcaaaaatacttaggcagcaaaaagacaattttctaaaatgatgggtttgagaagaatgaatcaacaataaatgttggtgcaaaacattatttaagaattctgaacatactcccgattaaaaatattttcaagagtgactccagcagaaataataaaatgctaggcacaaacctgttgccttagccctcctggctaagcaggatgcaagagcctgacccacacctccatcaagtgctctgaagtgctttgagagcatggcatgtgtgtgttcagttgagtgttttaggtcatgtcattttagggttaacgtcaccctcctggaaaaggacaggtagaaaggaagccagacttcgacccacaggccaagagtgaccaattacattgatcatgtggatgaattgaggcacaggtaaactgctaccctggagactaagtaagcagcttagaagagagagtgtgtgtatcctcacatccaaaggtgggtaggcaatctagggcaagtagacagcagcaggtattcctgagtcacaagctggctggttggctctgccatccttgacatgtgggttccatctctgggtccaaggtgactgctgtactgttttcagccaagagaaaagaagtgggggaaagagtcctggcaagcagaattgtcttcagagaggtgactcagaacctgcaaataccatgcctgctcatattccagtggccctaacacagtcacatggttccacgtaaccacaaaagagacttgactctgaagtctctagctgcacaaccaacatacccagataacacttagatccaggaagagggtttatttctaaaataaaaggaacaatatggatactggggaacaagatcacattctctgatatgtcacgcatatattgagttcatgctgtgtttgaggcattgtgggaaatacaactgtgaataaaaggatggcctgcattccagaaggcagtaaatacgctcacatacagtagcaatgcccacataaaatggagtgtgacaaggggtacatagaacccagtttatgaaagtttagggagggggggatttatttcctctgagtagaatttaggaaaacttattggaggaggtaagatttgaaatgggcccttaacactgcataggactaaggtagactggaaaatggagttaggagaaaggactgtaaagagggagagaagagcctttggtcagtgggaagggaaaagctttcatcccagctagagtcattttcatagctgtggccctttgagaaccatccagtaatcccacaaaaatgaccacacgaaggctgatactgtcagttttctctccaagtccattctcttatttccttagtgataagaatcctaacttttagttgagtgtattgtcctccttagccttctatagagccatatgtgatcccgtgaccaagttttggccaatgaggtagaagtgcaagtatcataaacagctactgagaagtattcctaaggcaacagcttcctttgcactttcttcatcctgctgcctgtaattgaggtgtgatggctagagctctgatggccattttggatcagaagaataagcactaaccctggaagtaacagcagaaagtcagaatcatccttctttcctggtgacaccatagaaccaccatggtggaaggccctggactgcctatctccagacttgtttgaagccaaaaggatgactttaggtgttcaagtcactgtcattttgggttttctgccatgtttaatgacaccaattcctactgagcacaggcaggtttcaagccgcacttgctcctagatcacacttaccaatgaatagagattcaaccaatagtcagcatattaatttcctattgctgccctaacatattaccaaaaacttagaagctaaaaacaacacaactttatttatcttacagttctgtaagtcagaagtccagcatgggtcctactagactaaaatcaagatgttggcaaagttgtgctcccttctagaggtgctaggggaaaatttatattctttcttacttaggttgctggatgaattttgttccttggcagttgtaggactgcaggcccatatttcctttcttgctttcacctgaggtctattcccagcttttagatgctgcccaggttccttggctcatgacccccttcctccatcttcaaaccaacaacagtggatccagtctctctcactttagatctctcctcctgcttctttcatcatcgtgtaactcatcagcgcttctgcctgcctctttcaccttaaaggactcatgtgattacactgggccaacccagatgatccagcatcatctccgaatcttaaactctgtaaccttaattccacttgcagagttccctttgccatgtgatgtaacatattccccaggtctggggattaggacatgggcatcttcagggagccattattctgccagagaatacaaggttcccttggcaacctcatccttttgtcaacttatgatcttgtttcaactgtcctcctcatttacaggtgcaataacacaaagggtaatttctccttgatacttatatatagccctgacagtcaggactcctacccagttctaattctcaggaataaagcagtgtctttgagcgatacctcatatatcttgggagttgtgcaccaactcataaaagacacctaatagatgtttcaggggttaggtttaaggcagaatttggtgacttctaggagtagttttctcaggtagatgtgaactgggaaccagggttaagacgagggtttctctctaactttcctcagagccagacctaaaatagcctaatcaacactgaaaaattacttaggtttcttgagtgggttgcaaagaacaacttctttacaaacttttttcaagttgcaattgaggataggattggaaaatacatgtatcatacccaaggcagtaatttcagagagaagagaaaagataaaacaaatgtcctttaaagaaaataaggtgacagggtaccatccaaattgtctgggtggaactaggcaaaggtcagccaatgagtagtcctctgggggatcaacttggagattaactctggcctcattgtactttctcctttgtgcactgtagaggagggaagcgcttcagtgttaggtccctgggacagaagctcgaagaggataaggaatttgcctattttgttttctttacacccaatcttcagaatactcagcaaacatatacagtatttgcatgaatgaatgaatacattgttgattgaatgactgcttgattggttaacagatacctaagtcctcctttggttccccatccccaaccccctgctgggctatattgcctagaagttaaaccttgtgctttagaatgagacatgaacctaggtctcacctccactatctattctgccaatgtgttccctgggaacttccttgagtctgtttcctgtctgtaatctgtagccaataattacgcttggcattgtgaaatttcattaagataatagatgcaaagtgcttagcacagtgcctagcagtacagtcatgtgccacaaaatgacatttcggtcaacagcagaccacagatacaatagtggtcccataagattttactaccatatttttattgtaccttatctatgtttttattgtaacttttctatgtttagatacactacttactattttgttacaatgacctacagtatttagtaaagtaacatgctgtacaggtttgtagtctagtcacagtaggttagaccatacagcctaggcgtagagtaggctttaccatctgggtttgtgtaagttcactctatggtgtttacacaataaaaaaatcacctaatgatgcatttcttagaacatatcccttgttgcatggctgtactcaaatttgttagcacttaatgttagttcaaacccacttctactgctaaaggggtctcccggtgatggtcaaactgaattcccagcctacatgcctctacttgaatcaattggcctgtctcaccagcatttcatccacatgtatgggtgcatgtacatgaggtgtgtgcactcatgtatgcatgcacataaatatcaaggggccaaagtaaatgtaaatgctatcttctccatgaagccaactattgaggccctagtcagaattcatctctccactttagaatttttgaatgtcgattaagccatctttgtatgtatcacataccgatgcctagcacagtgtctgccataatatagaaacctaactgtttctatattcatctgctcattcattttggatgaatgagtggatggatggatggtggatggatagaaagttaacttacttatgttctctggcagctccacagggatttatttatccttaggcacacaactagtcagcacagtgccttacccactgtagctattcactaaatagtggttggatggtgataaaggagaagaaaaattagaaaaccaagaccaatccccacctggaatcattctcctttcagggcattctattgaaaggagttattgagaagagaggcagggagttgacagccaccctctggactctctcccagggcctttttagaacaggaaagttaattatggaaccagattaacagtttcttttttgatacagccaaagtaaaaccagcaggatgcaatttagctcttccccactttccagatagcagcaaattttcatacaaaacaaagagacacttgaattgcaaattacttagagactcagctagcaaccccaacggaagaatatttctactttcaaaatccgctgttgcctttttaggtttaaccatgtagtgggaccttcacaaaggcctgggcgtcttgctgtttcaactgttggccaagtggggaggaggagcaattcattaaggtttactggaatgtcccagggtgagctttttgctcagaacattttcctcttctccagactgtctgtctctaactctcagagcaccagcctctactcacagaaatgagggctaaagggtttctagaggtcatctcactggagagtaggaaaagcaaatgcctataatggcaaggggaatgtaacaaataaaacaggtggtgaaggtgaatgtatgacctctaggaagtagatgaggacaggggcaaaactttaccccatctaaccatcactggaccattagtgattgttgctagacagttccaacaagtctgtaatctggattgttaattgaaacgttcttcttagctgttggcatctaattaataagggggaataataccgtctattagctggatacggactatggggccaccagtttataacttctgatctagcacacacggcttccttatttgatagacagggaaaccaaggtcaagagacagaaataaaagtataaaagatcacagagtgtcccaatcttctgacacctcctccagtgcctagctgattccaccatacagcctccccaaattcctgccccccacgcaggacacggaagctttactttcacaagagcatttattaacttatttttctgatttaaataaataattcctattttctacagaggacttggaagatttaacaaggataagagaaaattaaaaagtctcacagcagtgccattttatttatggaggaactggaggctaagatggaaacctagctggacccaggctgcttccagacacggccactggagggcaaggtggcatctcagttggcttagccaacaataacaggttgtaggaaggttagggcaggggttgaaaacacagccaggtacgtggcagaagtgagtaaaggaggacagatcaggaaatacggtgaacgaagtaaatgtgccctgcctgaaccctgtagacaccactcagattcagcttgtgtccttgtgtgggaatgcaaataatgttgacagccttttggaattttttaatgtgaatcttgaaatctaccctttttaagtaaaaattttcaatgtgtgaatgtagttcaaataatgtgtgtgtgtgtgtgtgtgtgtgtgtgtgtgtgtgtgtgtgtgtctgtgtcaaaacccttcaaggagcaggatttgggctatggactttctctttgtgaactctgtttagtgactcactgagaatgaactgggccctaggcaggtcagtcagctgggtggagagtttgtttgtgattagtcacaggccaccagagagctgtcatgcagatgaccaaaatcagggggacaagactgaggaggccgaggctgtccattgacttagttcagctgtcccctggagagtgagggcttcaacaagaaccaggctgcatcttggacagaccctatagggagatcttctgcccaaatctaaagcacctaccgtggccttttatagagtatgtgtgtgtgcatatgcatgtgaataatctttaccttgctaaaataatatagattatctcccttggtagccttgtggaagacaacttcattgtctccaaagtggaaatgtttaaagtcagtaaagttagcaatgagtgtgtcaactctttcctgtaatgagttactgtaatgaattactgaaagaagttaggcagtagaatggaatggagggagccgttgaataggagtcttgaattttcccaccctgccctctctcttgagcttctatttcatactctatgaagtgaaaattatgataactgccctgttttctatattggtgaggatttttttaaaaagaaaaacagaaaacccaatggcttaagaaaacaacaaaaactagcctaagcagagaagggtatgtatagttcacacaagtgaaaagttcaatcatagttaaatctgggggtccaaataacatcaaagctaggtacctctcactcaaaactgcagtcttgatttcccatgttggcttccagcagctctgggtctccatcttcatcattgcaaatacagtagaaagagaccttctactacattttcaacacaagtttcagaactgactttcattggtctgaaatcccatatccattctgaaaccagtcaatgtgacaaaaaagatgaaatgcactgagtggctggaccagcacacatttcatggagcaattaggcatttagctgaggatctctgggaccataatttgcattctgtatggtggcagataaagtagcagacctgattccctggcagaaataaaatgtttctactgaaacaacttcctgggaatctattccacttgctctataaagtgtgtctaaagctaaagccatccagttaaagagaaaagggcaaaatacttgattattgctgatactaaaatgagattgtatattttgtatttcttttctgtcctgtgtcgtgcaggcttcctttgacaagagaatcagaaccgactggtgacatttgtttcaatgaaagcaacagtgtgaagagtaagtagtttttcctattattcatctcactcagtggagataatgaactcctctccactgccaagatgagaaactaccatttcttacacatggacacaaagatgagaacaataaacactgagacttcaaaaaggagggaaggagaaagaggaacaagacttgaaatctacctatcaggtactatctttacttcttgggcagtggggtcattagaagcccaaacctcagcatcactcagtatacccatgaaataaacttgcacatgtaccctctgagtctaaattaaaaaaacaaaacaaaacagaacaaaaaaaacaccaccgctatctcttcctccaacccagtaaaataaacgtcagctgatctggtatgtcagatgccaagtaaatggtttaaactttctccattgtatatattccccagacaacataggacctgtcaaattatatatcacttaagatgtgctattggctgcaagtaacagaaagtacagattcaaggtggcgtaaataacaagaaaaaagttgttggccctcataagaagtcccaaggtaagagaggtccatagattgtcaatggagtaaatcagtaatattaccaagacttggattatgacctcttcagtgggttgtctctttcatcagtctccagcaaacttcctctcacatttattggccagaaatgtgttacacacccttgcctaaaccagtccttagcaaagcaaatggaaccaccatgattggtttagaataactgttagtcccttcttgatgttaagaatgggactcacattccctgaactacatggttgtgtggagaaaaggggatatataaacaaaactaaaatcttattagaaagaaaaaaggaagaaagaatagtgattgtaaaggcaatcaatagtatctactataagatgatactatgaaaatctcagcagtgcttcctctaagaggaaagcttataaaggtactcaagttctaagacctcacatactccatcatggcagagaaagcaggcacaagccttggctaacctcccctctagtcatgggtaaaatgaaagaaatacttagactctagatataaaacccaaggcattatcattataccatatgcagactgtttctccaatttgcataattataaactccccctcaaagagtaaacatcactgccaacttaaaaacaacaacaacaactacaaataacattaaatatgcattgctaatttgactttctaatttgtctgggctcttcacaaagatgtgcataactccgcagataccaactgcttaagaaaatcctccacctgcctgaaaaggcatcaacaggaaaagaaaagctaaaaattagttttttagataagaatttgagttgttgcctgaaaattacctgcagtagttcattctattaaaaaggactctcaaattcattgtcccaagcattgcttaccaccattcaagtataggcaattgctttgtgcagccaaaagaagataattttgcaagatctcaccattcagttttaagagtctcctgtgagctgtgtatggccttatatttggtcatttataggaaataatccaagagtttcagaaagacttttctgtctcaaaatctgtcttttattgatctgcctcaaagatccacaccacttgggcttcgaagctttgagctatagtacaaatatgctacctggccaaggtggattaagctattattattttcctcaatttcagttccctgatgagccgcgatgataagtgggacacaggatgtgtatatgcatagaggcaagtccttctgcaagaatggccataatcaaaaaatgaaaaaacaataaatgttggcttggaggcggtgaacagggaacacttctacactgcttgtgggaaggtaaactagtacaaccactatggaaaacagtgtggagattccttaaagaactaaaagtagaactaccatttggtccagcaatcccactactaggtatctacccacaggaaaagaagtcattatacgaaaaagatacttgcacacacgtttatagcagcacaatttgcaattgcaaaatcatggaaccaacccaaatgcccatcaatcagtgagtggatgaagaaactgtggtgtgtgtgtgtatgtgtgtgtgtgtgtgtgtgtgtgtgtgtgtgtgtatcatatatatatgatatatatatcaaccatatatatcacccatatatatagtatatatatgatatatatcgatcatatatatgatggaatatatatatgatatatatatatatatgtgatggatatatctatccatggatatatccatggatagatatatccatcacatatatatatatatgatgaaatactactcagctataaaaaggaatgaattaacagcatttgcagtgacctggatgacactggagactattagtctaagtgaagtaactcaggaattggaaaccaaacgtcgtatgttctcactgatatgtgggagctaagctatgaggacacgaaggcataagaatgatacaatggactttggggacttggggtgaagagtggaagggggacaagggataagactacaaatatggtgcagcgtatactgcttgggtgatgggtgcaccaaaatctcacaaatcaccactaaagaacttatgtaaccaaactgtaccacaataacttatggaagaaaataaaaaatttcctttgaattaaaaagttctcctggaggaggcatacaacttacatgtgtatatgtaatttgtaatatatgtgtatatatacttctatataatggaaatacctgttatgtataaacacataacacatatgaatacaatgttacatagtgagatccttttatacaagctattctcaaacccgctttgtgaactcaatattatagatatctttcctttgtagtttgtgtgtgtgtgtatgtacatgtcattttttgccattgattagtattgcacctcaggaattaatgataatttctttactcaatcctcttttaaactatacctgtcattcttagctatatcatcactatttttaattacatcaaaacattcttctgcacagagatatttctctgcacatattgctgtctctttagtaagctccttgaagagtcattgctaggtcaggtatgggagggaagaaccatagaggactagaatattgatactgcatgatcccttctgggggctcagatacgcctgtgaggctgggctcctaaagtgagtgagtgtgtgtgtgtgtgtgtgtgtgtgtgtgtgtgtgtgtgtgtatggaggaagaaaatgggaacaaagtgcaataaatgtaaactttgctgatgccacatttttacaccgagttgttacagaacaataagaaaactgctgttattgcagacaaccgttagatttgttttagtgtttacttcagcaacgtctctctgtgccttgtctaaactgtaaacaccctgtgggcaggagccagttctggtggttgttgctgttactgaccaatatataccaagtgtttaatatatttacattactgcgtttcaacattttttggtgaaagagtgaataaattatatagaaaatatttcctgaaaggaagagatttgcaagaaacttcctaaagagtggcatttctagggaatctattatcttcccaatctccttactcaacccccagtatctcttttgtatataatactttctatcccacagcaattgaaatgtagaaccatacaattttaggcattactctactgttttaaggcaaaaaataattctgcctcagaaagtattgtataaggagcaggttgtagtaaatggaccatccttgtcagtcaagagtttatctttaatgtaaaccactcaaccctggcctcaaggtcaacctatttttatggccagcatttgatttatttttatattttacttccatttttaaacaagataggttgctgtgcaattatgaaaattaaagtaggaataaacttggacatgtgactttatactgaattctatagattgcaaaatggatgggttctgttatgttgtgccagtatgagttgctccaaaacacactggaaaatgaaatattttttctctttccataaatgatatttatttgccttttctatttccaaagatgttttctatcatatcattcaggatcttacctaagtttcttgaattcttgtcatccttcccagagcagcaagggtggttttcaatttccctaactcacttaatgtctgtctggagttctgtgcccaccaaaagagctaactgaacaaacaccctgtacccatcacaaaccgacaacaccacaggctcctggacgtagagcagcattgacctaaaaatctttcaaacatccccaaggcaaaagggcgattgctatttggcaattcaaagtgagatctgcagaccaacagcatccacagcacctactacttccttagaaatgcagaattctaggcctcacccagaccatcctactgagtccaaatatacattttctcaagatccccatgtatttcatatgcatgttatggacctaaaggacaattccttgtggtcattcacctggatttcttcttattttcgagagatctttctgctttaaccaacaaaaagaagcacataaatactaagagtacattatttaaatagcccacactattattgtactgggcaaagaacacatttcatactgagttgaaggatatgttccctatttcaaaacaacagtttactcctttgacaatttcatcattttcatggcaacttcccctccattccttcatttgttcaaaatggcagcccttaagatataaacatgctattacttttatgcattgaatttagataaatataacacatgtaacacatttactatgaaatcaaaggaaaaagcctccctagaatgtagtgcagtaaaatctgtagtcactttaatgatgccatctcaatttatagacctgagtagatcatgaattctaaacaattgctggaatctaaaagtatctattgaaattaagaataaattctcttgtgggtgagtaggaaaagtttcaggagtgttcagttcaggaatccagttattacacagtacactggggtaaagggggaaaaatgttcctggaaataaccccaatgagatgcacagatagaagtgaagttgttagtgtgatcaaaggagatttaataactatttttaagtctggaaactattttctagatgtttaagtctgaacatactaccttagagttttgtatgtggttaatctcaactgcctgcatttctgaaacaaatgcattgttagtattgtgattaaatgatgctattgtataaaagaataaattatgttctatgaaatcaccaaaaaacatgtatatttatatggcaaccctataaaaaggctaaatcatggtttaaaaagagaaataaggtgagcttccatgctcccagcttctacttctaggcttatctcctccattctcttaaggtttccagtactctcagtctctctcaccctcctctagaggaaaatctattcttgaaatgaaatgtcagccatttatattttgtatacattcaaagatttgttctaataattagcagtgctatctctcaccatgaaagaatttgtctcccattaaaggaatattacatattagagtaaagagatgataagtactgactagattagaattggttttatctgaacagttgatagcttcctgaactttagtgttagtattctgagactgcatctggattcaccaggagaaaatattttataatcagtgatgtctaccatgtgtatgagataaggacatagccatacatctgctatgtaatatcccataccacagcttttactgagcttgtatacagcatccattgttaagtacttgcaagctactttatttgtctattgatgaatatcaaattatctcccccaaattaactgccttaaaagaataatacacattatcttacagtttctatgggtcaggaatctttgagcagcttacctgagttctctgtctcaggggtttcctacgaggacacaatcaaggtattagccaagactgcaggcccacctgaaggctcaactggggaaggatccacttccaagctcactgacatggtgattagtcacactcagttcctccaaggctgttgcacagagggtctcatttcctcactggccattgtccagagatttccctcagtttcttgccagcttgccctctcctttagggcatatacacaagaagagtaagagaggtggttagcaagaggaaactcagtcttttgtaacctaattatagaagtgacatcccatcacttttgcctaatatgttcactgatgtaagtcactatatctactcaaggccagaggaagatacaagggtgtaaatcttagggggtaggaatcagtgggagccattctgaatatttaggttgatttaaatcttttccttttatatacaatgctgcaataagtatatcctctagagaattgttttgaaaagtacttggctttcactactggtgtttagtagcctttttgtgattatataaaaaccacaaagtcactgctagggccaggttggggatagtgacattaataacaggaacacataaccagcttctgcacacctcctatgtaattctctgatcattctccctttgcttcaatgctgcacagacttcattccattccctctttaccacggtcactcttaagacgcctactactattatcccatttttgcaagtgatgaactagacatagagaagcagaatcactcactcagggtagcacagctaataaggaacagagcttggatttagacacaaatccacctgactttaacactggtgttattgccactgtgcctttcgcctctctggaattagtcgataaagtggtctcctaaatattttgacaacgtacccctattagcaataacttttcagaatatgcccttactatgtgtatatgtatttataacatatctgtaattttaaaaaagtcaatatttttggataaaagtgatcatgaatagaagttattttattcacaccacagtggattgtcttgcccagagctgatgctctctggatgtgacatcctctggtccatgacttcctagatgacaatcaagtgggcttatgggatagagttggatgcttctgctgcccagatacttaaaaaagagggggaaaactgactttcagcctcttctttgctctattatgagtttttgaagaaatactgaatgagtaggagtttggacaacttcttcctttcactttgtgtcatcaaatctcttcaggaagggtattggaggactggagcagtctttcttccatccttggagctgtggtctccactgtgggagaaaataaaatgcttttaaatgctgccacctcactgggattgagtgaatgaggaaagttcagatgctgtttccaagtgaagttttatactttatgaagaactatttattatggctttaaaattatttatgtgtttactttagataatacgtggacatggtaaaaagcatgtttaatgcattatgaatatttactgaaaattaagctttctgtagagactgtctacagcccctctacttttctcccctaaagcaaccactttgtatgtgtgtatccttccagtgagagtctatatccatacaaattcacatgtggatgccccttattttttttataacctaagtgatacacccagtctctgtaggtggtttttttcacctgttacttcttagagattgtgttatattagtatacacaaccattacttattcctcttaatggccacataatattgtatagtagaaatgtaccaaaatttatgtaacagctccttatagatgaatatttaggttgatttaaatcttttccttttatatacaatgctgcaataagtatatcctctagagaattgtttcgaaaaatacttggctttcactggtggtgtttggtagctttttgctgattatataaaaaccacatagtcactgctggagccaggttggggatagtgacattaataacaggaacatatagccagcttctgtacacatccggtgtgattctctgattattctcactttgcttcaataattggtatcttagctgaacaagccccacaatgctaccatgagagaaaggtacttgtattaggtgactttgctggaagactagagaaattaatgctccatcttccatctttggatttcccagtgcagctgtgggaagcaagtgtaggaactcttccatggactggccagcaggatttatctattaataggagggtagggcagccttgagcagtgatagcacagtgtagtaaggacagcatcagcttcaggtcaacatatttaacttgtgtgggcagttccccaaaccaagatactgtcaccagaaaatggagctgtggatgctggcctggcacaagccatgggtgcccactttaggggttgttcatgcagacccttcatcagagacccttcattgccatcccttccatagctctgaatatccttgttactctggtcgtctttcctcactgggattagatgacctcaaagatcctatccctctcaaactttcccccaactttataatttgccatcacatcagggaggcagggtctggctcaggcacctgcctttacgttgttttatccccatttgccagatcactcagctccccaaaagtgtcaacctactctttcccttgccttcctggttggctgcctgtggaaattactagcaagtgtccgactaaaatcattctgaagacgtgtgtttgcttcaatttttaaatcagtatgctggccagggtgtcaaaaacacacagagaaatctcagcctctgagttctgactgggctttttcaagtatggacatattgttataagcgtagagatgactaggctgactgaacctttcccttgggccaagtgtcacaggaaaaacttattaataacaaaagcagtagcagaggctacattttgagttcctgctttatcccagagtctgtatgaggcatagagcatccacagagtatgggaccagtctaactggttggaaacctcatctccatcactcagtagctgtgtcaacctggtacatttcttgccctctgtaaatatcagttacaccagctacaaaacagagcagtaattgcacctacctcacagggctgctgtgaaaaatcagacaatgtagcccctgggacatacctagccagtgcctggcatatagtaagcacacagtaccagctgactaattttatagctgttcctgaaagattgtttctcctcatttcataaatgtacaaactcagaatccaagaaggtaaataacttgcccaagaccaaaagtagcagaactgggactcgaacttaggtcatctgcctcattaattcttcaaatatttatgggtgcctcctatgttccaagcactgaggatagggaaataagtgagcaaggcacaatcctggcccccatggattttacagcctgatatgataccatcaaatcccttgacatgcctgccatccattcccttcataaagctgccccaagacacctagttaaaatgtccctgaatactcttgacagtaaccacaatagctaatatttataggatactagtgggtgctcatttaatctctccaaaagccctgtgaggcagctacaatgattatctcctttttactggttaaaaatctgaagcttaggcagaggcaggtgtatcatgaagtcaggagatcaagaccatcctggctaacacggtgaaacccccgtctctactaaaaatacaaaaaattagccgggcatggtggcgggtgcctgtagtcccagctacttgggaggttgaggcagaagaatggcgtgaacccaggaggcggagcttgcagcgagccgagatcgcgccactgcactccagcctgggcaacagagcgagactccatctcaaaaaaaaaaaaaaaaaaaaaatctgaaacttgcagaaagcagaatgagttcttgaacccatgtagctagtaagtggtggagcttggatttgaacccaggcaacatacaagaatagttcattacgttgtttaaaggagtcaagctgacttgagactgggattggagatagaacaaaaagttatgtcagtgctgtagtccatatccaatcacatataaggtgcatcttatttttctgtgccctatgctcctatagtaatcctcagaggttaaaaaacatatatactaggaaggactttcagctgtgaaaacaaagcaaagaaagcaggcactatcaaattaaaatcaggcagtgggactttgactaaatctgccttcctgcactctgcttagttgcattttcaaagacctctgtcctcgaggggcaagctttgttaggatggccagtggcagatacaggtctacttcagcccctggaaatagagtttgacttggctgcgtgcagacaggcatggcctggggagacgtaggccagggcaaagcccaggggtctgactgataaacacggccacggctagtgacttctgcagaactgctacagatcacgaacagagttgcgttcaaaggagtcaaacaaacttcagttctgcctccctgattcagaagattcatctgaatctccataggagcctggtgggtccacggaggcagcgatgctggcataagtaaaatactagcagcatgatttttccccatttgctggctttattcatggctcatagttacactccctccagtgagggagactctgtgcaaccctaagacactgtgagattgttaactgggagtaaaaacaaggcagaaaagagaggccccctgcagaaaacaaagaggccttgcccttcacaaacagacaaagccagacgcagctggagcctaagtttgtgtctctgttacttgcaaaacgtaacacccagcaaaatacagagactagatttgtatttttgttcccaacctgaaattaagaaatctaaagcaataagtccttcgtggaccaggtttccacctgcctcccaacacataagtcacctcaggaaaatataaagaatggtcccagactgtgccaaggaagtggggcacagttaatagagccaaatctggcaaagcacataattctttgccaacagcttgcagatatgatgtctccttaagcctcaagtcaccaacagagggtgtttttaactcattttacccgtgtacaaattctgaatatcaagaaagattgagagatttgcctaaagtcatgcaacaatttgatgaaagagaatcagaaccctggatatccctggttcttcggcacacttagatttcagctgcttctccgggggaaatgtgataacgcctggaggctgctttgcacagccagtacaacctgtggagaactccgtcctcattagctgtcattaagttgccgggacctccagttgctcttcctatggggcagaactgaagaccaatgtcatttactttgtatgtccacctcctggggttacactggaaacgcttctaatgaaccacagcagaagaaaacatcatcctcaattagagcccttaggaaaaactgctgcattttcctacctgcagaggaaaacactaaatcgggagtctgtatatgaataaacagaggagaagaaaatttacaagtgtgatgactccgcaaaagctcccctgagtctttacaatggcaaatgacccatgagctttcagagccaccatattagttttttgtaaagtagcttttgttgttgttaatgaaaacacgatccttttacttagattctgtgatcaaaggagctaggaggtcagggtgcacacaataagactgtctgccaggcataggaatatccacataccttgtaactgctcggtggaacagaggtgggatgtttctggtgccctaaaactctttcacccagaacttgccactacactgctgaagaataaatggtagcagagtggttaagagtcaagtcaaatggagtttaaggcctagatctgccacttgcttgctgtgtgatgttggaaaaatattaactgctccaaatctataactcttcagctattagccgctctggagctgctaatatacctaacaaatagcatataaattatttagctgaataaatgggcaatcttcttagtagtattagtatcattccaacacagctggaaattaccccagaaaccacctcgccaagacagtcccaattccgactgaacatcagcatcacacaaggtgcctttaaaatatgcatgtggctggtacccagacttcctacccatccagcctgttttcaggctctcggcatcatgtacctccctattcctttgataagccattgcaaagcctgtctaaaacaaagctatttgcttccattagctaagactacgactatttttcaacatgtctgaggaacgagaccaggcttctctacttttcaaaactcctcaggtgattcttagcaaccagattagcatcagtccttagaacaacctcagacacccactaacacatgccctagagaggctaagtaacccgaaggtcacagaaccacagagttaattaacaacgacaacaaatacacccttggtgttcctgatttccgtcaaatagccgccttgctgagtcagcacaacaaaattctaaaaattagcagaatagttttcgtggttggttgtcttaagtgtggtccatacagtcctggtttttccatgtgtcagcaactgtttagagctaccaacagatttctccctaaagacttacactgtgggtttcagttagaattgcaaacccagagatatctgggaatctgtctgagttaagcatcgctgacttgccccagggaagactggctttttaggacaggggttccccaacccccaggccatggatcagtaggaaatgggcagcatagtaggaggtgagcagcagatgagcattactgcctgagctccaccccctgtcagatcactggcagcattagattctcataggagcacaaaccctattgtgaactgtgcatgccagggatctaggttgctcgctccttacaagaatctaatgcctgacgatctgaggtggaacagtttcatcccaaaaccatcctcatgcccccacatccctggaagaattgtcttccacagaactggtacctgatgccaaaaggttgggaactgctgttagaggacacaagaccacagtccaggtatcacagccacatcccacagacaccacctcccgttggcttcctggatgacaggcacagtgttcaggaggaaatgagcagataagaaaagtcaacctggcacataaacccacaagggatgatacactttgcaggcatcatctgagggtagtattaagaagagcttgtggagaaaagggaaaccttgcacatacactattattagaaacgttgattagtggtgactgtggaaaactgtatggaggttcctcaaaaactaaaaacaattaccatatgatccagcaatttcacttctgggtattaacccaaaagatttgaaatcagtatatctaagagaaatctctgctctcacgttcactgcagcgctactcataatagccaagttatggaagcaacttaaatattcacctgtcacacttcaaatctctcttgcaggaaaagcccttggaggggcttccccgattagtcggccttatccaggctaacctctgtcttaaggtaaactgctttgggaccttaaatacatctgccatacccctttccagcagtacctagaatagtatggaaccgaacaagtgggagacagtatgtgtgaaacaggagccaggaatcttgaggaccatcttagaatccttcctaccacagatacatttttcttaccaactctggcttggatcaaagcaagatgggacagagagctaaggtacaacatgagcataatagttaataatattgtattctatactagaaatttggtaagagtagatttaggtattcttaccacaaaaagtggggagagactatgtgagattatgaatatgttaattagcttgactatagtaagcatctcactatacctatgtacatcaaaatatcacgttgagtttcttaaatacacacaatcaaattttttaaggacatataccttttataaaagggacaataaatttatgagaaatctaccttttattagcagctcatgaagtaattctttaaagattattctcattattctataatcataccctatatgtgggacacccaagactcttcagccagcacttagaagaaatggaagttaaagatgctaatgatgctgtattattagacagtatttaggaataatcccaaatactcctcagcatgaggtgtaagccacttaaccattttatgcctattttatcacccctaaaagaaagagatgaatgtttaccttgtaaggctgatatgagagtttaaggatacattttgcctaaatgattatgccagtgaacatccatcatttcttacaaactcaccacctacaggcactgtgcatacttctgagggtattgtgatataatcgaaggtgtgtgactttataactgaggccaaagccttgactcaaccccagttccaaccctttcagcaaacgtattcaccactcagagcctcagtcacttttgagggtggtgagaaaaaggatagaaaataatgtgtagacctagtgtatggtgtccacccaatatatgctgagtatgcaaatacctacgctatagaaattgttacaccatcattcaagtaacaccttcattatttttgccagaattgcataccatctattcagtagtttacttaatactatttagatcaactattttaccatctgttcagtgatttacttaatactatttagatcaactattttacatccataaaaacatggttttgatgtgcttatttcatttttttctaagaccgtgttaaaataagtgctttgctattaaaataaaagtacactaaccaaaattaccatgtgtactaccaaagataaaaataccttgcactgggaaatgtgaaaagccacttttaaatgaagaagagtgttccttagggttcctgaataaataaattgggagctacccatatttcaaataacttaattttgttttttgagagtaccatggaattcaattcatctgatttttaaattaagcctaaggaaaaggaaaaaaaatgtgttcagctaaaacgaaaatataccagggccagaactcgtgctcagatatttgcaattccaaggcccgtgtttttcataacataacaaaataaatggaggaaatgagaaggaggcagatgaagaggtggggtggggaagagagtaaagacaaaattgcagaggaagggcaactagccagtggcatccagaaagacagaaacagagccagagaaagcaagaaaggcagagagagagagaagagagaggatagagagggacagagagagatggaggcagaaaaagagagacagagacacagagagaaagagacagaaacaaagaatacattaggaggaaagggggtaggatttggtagattcttaagtgattataaacttttattatcaccccaaacactggctctcgtgggctttaaaagacagttacctcctatcacttctctttgtacattatttagttgatcaatagctcttcagctgttctcttaagcctttagaatccaggtgacatggcatccccttcgggcaaaatcatgaactgtacgacttgtttatcattagggcatgtctgactttttctgatttcaggatctgaataaatcaagctgggatccttaactctaagtctctgcttttggtctgattgtgctatggcaatgctactaattgtactatggcaaccgactgaaaatgatgttgaacaagagaatgagatggtttccttttgactttccttttactgctaagtggtcctcaggaggtgaatttcttgcagacatttgctgctacaactagaattaaattttctgcctttgccattttctgtcccaagaagcaccacagtgctgcctgcttagtacctagggaagagcactttcattctatattttaattaggccctgacatctggtatggactgtgagtgcttatttgcacacctgcaggctattggctgtaaaggcgcccagcctatgtggcgattaccagtgcagatggagattgcagtcatttaatttaatagagcaattgtgtgggccttgtagaatgtaccacaattgtgaaatgtgggccccgtcccaattccaggtatcctgtgctgttccttatgtaacacgcacttcactctcctgtcaatctttataataaacacagtcagaagacaggattggcaacaaagctgtctttgaaagctttcaggtgagaaggaagagagctgggtctctaggaaagaattaaatttgtaaagacaatggaatttgccaaggatttaaaaaatcactaccctcctctgttaaacaaatacccctatatggctccaactcatctatggaaactctgtctttcagtgtgcatcaaatggtatacatggggcactgagaaggaagcagatgtaacaggagatggtcagcgtggccttgtgtgtacttgtgtttccatgacatggggaagaccccttacttgctcagtactgaaaaatgccaactccagactgaggctcctgttttcagagttcacctgtcacactgtttcatttacccctgtgttctgcatccccagtacctctcccagtgtccaacatactgtgtgttctcagcatttgtgaaaagaaaagagaaacagtaggccaactgtgccaaatccctgatgcccatcagcttcctgaatgcatctttctggatgttcttaaagctttgggcccaccctgggtaacttgctgggaaatccacctatcaatatattctctggctataaaactacgatgctgttaattggcttatgttgtttcctacttatttcttgcatgtctgtgtcccagttcttttaggttttagctgagtaggcagggcacttataacatagtggcaaatgatataaacagaacaatgcctaatgccatggtactgattaaaatttgagaggataggaattctctatggacctggaaagtgaggatgaccttgctttagatcatgatgtatgggcagtccaagaaattgtggaagtgttcaagaagaaaggcaatataaagtagttaacagcatggattttggacaggcctagtttacacacccagcttcaccatttttcagccatatgaatttaggtacatggcataatctgtctaaatcatagtttcttttttaaaaaatgagcataattgtgaggatgccacgtgacttctagaaataataaagattaaaagaagcaataggcgtaaaggatttagcaaaattctagacatacagtaaattaatgctttaaaattcatgatgatgatgggaagaaataagaggaagatgacaatgatggtaatgaccaagattccagggtaggttggcctgactggaggaaaggaagagactacctacctcgggaaggagttgggagtgaaggaagtatagcatcaggtagggtagaggaacagattgaagaaaacctgaaagactgagaaatactgagagacagaaatgttcgggagagaaagagaaaaaagtttacttccaataaatgcaagggagtcagacttcagaacaaacacaaaacacccatctttaagggaatatatggaaaaattaccaaggataccaagtttacatttgtctactcatagtggaaaaacagctttctcatgcaattgccatattcagaaggatcaagacatagccgcagtcaccagcatagcaagaatccaggattaaactgcttttgttagggagccaagctttatgtgaaataattaaagttcaaataatttgaggaccagaaccagtcagagtaacctgttattttgggggggggggttctgcacacatgaccctcacaccatattggaagcaaagtgtcatttttttgcttctaccaaagtaatatttataatacattctatggcaacagataattccaatatgaggactttggattcagagagactttggttcaaatcgcagaattaccattaaatagcactgtgagctcagaaaatacgcttaatatctctgaagcacagtcgcttcatttggaaaaaggggatgaaaatatctctcctttctttttatggattaaaatataggtaatcattaagcatagtgcctgacacactgggagtattcagtcaaagacagctgcttttctcaggttgcccaaagcgtgacttcctctgattgctcaagtgacatggggaaaatacaaattcaaagaagagaatattgacttatatcaagcttgtccaacccgttacccagagcagcttagaatgcagcccaacacaaatgtattaactttcttaaaacactatgggattttttttacttttttttaagctcatcagctatctgttactgttaaagtattttgtgtgtggcccaagacaattccttttttttttccattgtggcccggcgaagccaaaagatttgacatccctgacctagatgatcctgggagcctggaacttctccaccaagcttgaaaaatcccccaaagactgagtaggagcaggtgtcaaactgcagctgccttgaccatgatctaggtgaagctgtgtgtgtgaaatagcaccattgtgcccacagtcatctgtagcaaaatgagaaaaataaagaaaacgtaatattttttttctaaagctaattcttttaacttaagggatgattatttattctaagatcatgtccttctaacttttttaaattattattcaatcgttttgggggaacaggtggtatttggttaaatgtttaagttctttagtggtgatttctgatattttggtgcacccatcacccgagcagtgtacactgcacccaatgtgtagtctttatccctcatctccctcccacccttcaccccaagtcctctgagtccaatgtatcattcttatgcctttgcatcctcatagcttagttcccacttataagtgagaacatacaacatttgattttccattaccgagttacctacttagaataatgttctccaactccgttcaggttgctgtgaatgcctttgcttcattcctttttatggctgagtagtattccatggtgagtgtctgtgtgtgtgtgtgtgtgtgtgtgtgtgtgtgtgtgtgtgtgtgtgttctctttatccactcattgattggtggacatttaggctggttccgtatttttgcaattgcaaattgtgctgctataaacatggatgtgcaagtgtctttttcataatatgacttttcttttcctctgggcacatacacagtagtgggattgctgaatcaaatggtagttctactttagttctttaaggaatctccatactgttttccacagcggttatactagtttacattctcaccagcagtgtaaaagtgttcccttttcaccacatccacgccaacatctattttttttatttttaaatgatggctattctttccggggtaacgaggtatcacatcgtggttttgatttgcattttcctgataattagtgatgttgagcattttttcatgtatttcttggccatttgtatatcttctcttgaaaattttctattcatgcccttagtccactttttgatgggattatttgtttttttcttgctgatttgttcagatttcttgtagattctggatattagttttttgtcagatgcatagtttgtgaatattttctcccactctgtgggttgtctgcttactgataatttcatttgctgagcagaagctttttagtttaagttccatctatttatctttgtttttcttgcatttacttttagattcttggtcatgaagtttttgcctaagccaaagactagaagagtttttctgatattatcttctagaatttttatggtttcaagtcttagatttaagtatttgatccaacttgagttgatttttgtataagataagagataaggatccagttttattcttctacatgtggcttgcattatcccagtaccatttgttgaatagggtgtcgtttcccccattttatgtttttgtttgctttgtcgaagatccattggctataagtatttggcattatttctgagttctctattctgttccattggtgtttttatacgagtaccatgctgttttggtaactgtatccttgtaatatagattgaagttgattaatgtgatgtctccagatttgttcttttttgcttactctttctttgactatgtgggcctttttttgttccatatgaattttagaaatgttttttctagttctgtgaggaataatggtggcattttttatgggaattgcattgaatctgtagattgcttttggcaggatggtcattttcacaatattgattctacccattcatgaatatgggatgtttttacatttgtttgtgtcatctatgatttctttcagcagtgttttgtagttttccttgtagaaatctttcacctccttggttagatatattcctaagtatttttactttattttttattttttgcagctatcataaaaggggttgagttcttgatttaattctcaggtcagtcactgttggtatatagcagtgctactgatttgtgtacattaattttgtatcctgaaagtttactgaattcatttatcagatctaggaactttttggatgagtctttagggttttctaggtatgtgattatatcagcaaacagcaacagcttgacttcctctttgtcaatgtggatgccctttatctctttcttttgtctgattgctctggctaggacttccagtactacgctgaatagaagtggcaaaagtgggtattcttgtcttgttccagttcttagggagaatgctttcaacttttttccatttagtataatgttggctgtgggtttgtcatagatagcttttattaccttaaggtatgtcccttctatgctgattttgctgagggttttaatcataaagagatgctggattttttcaggtgcttttttctgcatctattgagatgatcatgtgatttctatttttacttctgtttatgtggtgtatcacatttattgacttgcgtatagttaaaccagccctgcgtccctggtatgaaacccacttgatgatagtgtattatctttttgatacgctgttgaattcagttagctggtattttgttgaggatttttgcgtctatgttcatcagggatattggtctgtagttttgttgttgttgttgttatgtcctttcctagttttgggattagggtaatactggcttcatagaatgatttggggataattccctatttctctatcttttgggataatttcagtaggattggtaccaattcttctttgaatgtctgatagaattcagctgtgaatttgtctggtcctgaagtttattttcttgacaatttttaaattactgtttcaatcatgctacttgttattggtctgttcagagtttctatttcttcctggtttaatctaagagggttgtatatttccaggaatttatccatctcctctaggctttccagtttaggcacaaaaaggtgttcatagcagccttgaatgatcttttgtatttctgtggtaacagttgtaacgtcccccatcttgtttctaattgagcttatttggatcttctctcttctttttttggttaaattccctaatggtctattgatttcgtttatcttttgaaagaaccagctttttgtatcatttaccttttgcatattttttgtttcaatttcatttagttctgctctgatctttgctatttctattctgatgggtttgggtttggtttgttcttgtttctctggttccctgaggtgtaaccctagattatctatttatgctctttcagactttttgaagtaggcatttaatgttatgaactttccttttagcactgcttttgctgtatccgagaggttttgataggttttgtcactattattgttcagttcaaataattttttaatttccatcttaatttcgttgttgacccaatgatcattcaggagcagattgttaatttccatgtatttgtatagttttgaaggttcgtcttggagttaattttcaattttatttcactgtggtctgagagagtacttgatattatttcgagttgcttaaatttattgagacttgttttgtggcctatcatatggtctatcttggagaatgttccatatgctgatgagaagaatgtatattctgcagttgctgggtagaatgttcttaaatatctgttaagtccatttgttctagggtatagtttaaatccatcatttctttgttgactttgtcttgatgtcccgtctagtgctgtcagtcgagtaccgaagtcctctacaattattatgttgccgtctatctcatttcttaggtctagtagtagttgttttacaaatttgggtgctccagtattaggtgcatatatatttaggattgtgatattttcctgttggactaatccttttatcattatataatgtccctctttgccttttttagctgttgtttctttgatgtctgttttatctgatataagaatagctattcctacttgcttttggtgtccatttgcatggaatatctttttccatccctttatcttaagtttatgtgagtcttcatgtgccagataagtctcttgaagacagcagatatttggtgaattttaatccattctgccattctgtatcttttaagtggaacatttaggccatttacattcaacattagtattgagatgtgaggtactgttctgttcattatgctagttgttgtctgaatactttgtgggtttttttttcattatgtcattgttttattaatcctgtgagacttatgctttaaggaggttcattttggtgtattttgaggttttctttcaagatttagaactccttttgccatttcttgtagtgctggcttggtagtggcaaattctctcagcatttgtttattttaaaaaggtgttatctctcctttatttataaagcttagttttgctggatacaaaattcttggctgataattatttgttaaggaggctaacgataggaccccaatccattctggcttgtagggtttctgctgagaaatccattaatctgataggttgttctttataggtttcctggtgcttttgtctcacagctgttaagattctttccttcatcctgactttagataacccgatgactacgtgcctaggtaatgatctctgcgatgaattccacaagtgttcattgagcttcttgtatttggatgtctagatctccagcaagaccagggaagttttcctcaattattccctcaaataagtttttcaaacgtttagatttcttttcttcctcaagaaaaccaattattcttatgtttggttgtttaacataatcccaaatttcttggaagctttgttcattttttaaattgtctttgtgggattaggttaattcaaaagccttgtcttcaagctctgaagttttttcttctacttgtttaattctattgttaaactttcagtgtgttttgcatttctctaagtgtacctgttatttccagaagttgtgattgtctttgtgatatctatttctctggagacttttccatccatatcctacatttttttaaattttttaaagttggacttcacctttctctgatacctcctttagtagcttaataatcatccttctggattctttatctggcaattcagagatttcttcttggtttggattcattgctggagggctagtgtgatcttttaggagtgttacggaaacttgttctgtcatattaccagaattacttttctggtcccttctcatttgggtagaccgtttcagtgggaaggtctaaaacttaaaagctgttgttcagattcttttgtcccacagggcaatcccttgatgtggtgctctcctgctttctctagggatggggcttcctaagagccagactgcagtgattgttattgcacttctgggtctagccacccagcaaggctactgggccctggtgctggggaatgtaggctggtgctggcgaatgtaggctggtgctggcgaatgtctacaaagagtcctgtgatgtgatccatcttcaggtcttccagccatggataccagcacctgctctagtggagttggcaggggagcgaagtggactgtgtgagagtccttggttgtagttttctttagtgcactggttttcttgaatgctgattatgctagcagtgaagttgtcatgtggacatactcaggacctctggttagccatggtgttgcaggcagtggaattagctgtcgttttttccttctttggaggagggtggttctgttctgagttgctgtcatggcttgagtactccaaaagtacttttaagagtgtaccagctgcagtagtagaagggggatataatcttaccctacgctggccaggatgagtacttgggtttctgaggtgatgggtggggctattgagctgccaagagagtatctcttttatcttcaactactagggcaggtagagaaaaaccatcagtttcggggagggtaggtgggtctgagctcagactctccttgggcagggcctactgcggccactgtgggggataagggtgtggttctcaggccaatggagttatgttcccaaggaaattatggctgcctctgctgcatcatacaggtctccagggaagtgggggaaagccggcagtgacaggcctcacccagctcccatgcagccagcaaggccaggctcactccagctgtgttccaccaatagcaccaagtttgtatccaagcagctggcaagcaggctttctaacatttttaacaaaaccatggtgagggtgaaagtagttgattggttttattttttattttgtttttcttttaatgaccttaattggaaaagtaaaaaatttggcaatcctaattcagctgccaaaatttcttagaaaattttactgtagcatataatccaaaagaacggggaactttggtttagaaagcagaaatcccttgttttgccaactgggacattaggagcaatcgcagtgccttttattcatgagtattgtgtatgcagactatacaggaagcaaggtcttaaggaaaaaaagaattctagcctgcttggttattgcttatttcaaaatgcaagcacacaatttaaaatccggtcacacctccttttgctgagctacaagcctgctattacaagtgtttgtaaagtgcctgttagcagttaataagtaaaggtgttggcttatattctgagggtatcaaggtgctcagacagcctaatttgcctattataggatgaaatttgatccctctcttgatgttcagatttggggagccatattccaaaactcttggtactttcctccattgcgtaaagacacaattctaagaacatttgtgaaatgtaaaagacagagtccaagaccctgtaagcatggcctacacgttgcctctgcggtaatggctgcggtggaagtgctgggtcttggaattactccactattcctattgacaagcaaattctggagcacagccagagtggaaataaaggatgagttactatattgaaacaggaaatagaatttaagaaaataggtacaaaattcagatttttctctctggaggaagatgtttccgaaaagaaaataattagcctttggtgaggttggaatgtaaggaatgaaaagtttgcatgaggaaggtgaaaaggcatgcttggagggagcacagaaaagagcagacctatggatattccttggggtatagacatattgacagttcctatacagcctattgccataggtgtctataaaacattaagctctgatatgtggaaagaccagatttagaaaggcctcagctattcactcatgccttcctgagttcagtaaaacacatggagaaataacaatcttaaaaaaaattgttcatttattttctttttgtgcattcagtgtatgataattatagacacatcatttatgaatgacaaaactattctctgattatctgggttaaagccttggaataagttatcgtgtttacctgtgtttccttcatgatacaaactaaggactaaattgttattcaaaatgtcaatcgtcattccagaagaggctttgaaaaaattataatctagatagatccaccagacagataccagccaggacttttcttatgaagcatacaaaatatttaatggtgtctgtgcctagaattggattcaagtcagataataaggcaaattcagagaaaatgattagaatctgaaagggcccagaaagacaaatctaacctcttttccagattcttaaatcataattttttatgactcaaaaaaagctctaatgatcatataatatttttttgtggattgtgtttctgagtttattattattttgaagttactgagtctgagaccctaaaaagcccaaatccagctctgctaatcatcctactgcattgtgggtttcccaagaaaatcatgtaccatggcagacagtgaaaaaggatggacagtgttacattattgatagctgtgaaaatgcttcaaagctctgataaaaaggttgggttgattcacaaggtttactgagacctaaattattcttcttacctgccctgtctctctttctctactctccatctaaatcttgactcccatgttccaaaacatgaccctgcaggacaggaggaataaccaggccccaaaagggacccaagtctactcacccatctgtgggcatggagtcagaaaagagagaggttagcagtctccccaagtggcctggctgcctacatctgtttatcacagagactggaagacagagtacgggaaagaggctggagcttttcaggatacaatgatcttgacccctagttccctccatgtcaatgttttgatcagtcagataagcatcttctcttctcctgtaaaggaaccaagaggacagtgaacagagatgaaagccttctgatatagggatgtatttctgaagtgcatgtttcggcctctataataataatatctgccatgtatcaagtatgtagtatgtgctacatgctgttcagagggctgtatgtgtgttacctcatttcatcttcacaggaacctgtagtgttggcattgttatatactcaagttacagattaaaaaaaacaacacaagctcagaaaggtcaagtttcacctccttcagctatctacccagtgtttaaatacccgctgtgatggatagtcacattggctactgttggcttataaaaatagaaaattcactttcaccactactcccaccctagatagcttaattctactattggtaattctgatcatgattaatttccccctgctattaaaaatgttgactccctatagcctattacactgactactatttgtatcttctataatggtggttctcaaccagggtgattttacccctagtagacatttgacaatgtctggagacatttttggttgccacacttgggagtcggggtgctactggcatctcatgggtagaggccagaatgctgctaaccaccctacaatgcacaggacagttccctgcaacaaagccttatccagcctaaaatgcgaatagttctaagattgggaaatcctgttctgcagccacacaagacaaattggattacattctgcattagcccttagatgtctcaagaaaacaataatgatacatctaacacctccaccatatatatccccccatccataccacactgactctccagtcttcctatgcttatctgtttaaaattccattttaaaaaaaggctcagaagactaagtgaactacccaagtgaaaaacaaagccagccctagatctgagattacttagctccaatttcaattatcttctaattatatcatgtctaatctttcaatctattcactgggaataaaagtgaataatatagacaatatctctattctcacaaagtttatactccagtaaacattaacttaacattttccctacccttgtatgaattatcttctccactgtcatttgagttgctcatatcaacttttaaagccaataaaaaaattcccatagtcagggccctcaaaggaaagcataactactttcatggcaaatgaaggtctgtgcatatagatcaatagaacagaagagtccgaaagtgaacccatacaaatgattttgacaaaggtaccacagcagttcaatgggaaaaggataatctttttgataaataatgttgaaacaattgaatagtcatatgtaaaaagattaatcttgaaccctatttcataccataaacaaaaattaaatcaaaatggatcataaacctgaatgcaagatctaaaattacaaaatgtattttaagaaagaaaaaaaagttagtgaccttgagctcagtgaagattcctttaaaacaacaagaaagcgtgaactgtttaaaaaaatcaataatttgaatttcataaaatcaaaactttgcaattaaaaaagacttacaaaaataaagcaagctatatactaggaaaaaatattcgcgtgacatgtatttaacaaaagacaatatgtctaaaatatgtaaagaactcttataacttattaagacaacccattaaaaaatagggaagaatgatgtgattattatgcagtgcatgcctgtatcaaaacatcctagataccccataaatatatatacctactatgtacccacaaccattaaaaattttaaaaagagatttgaacagacacatcaaaaaaattacggatggcaaataaacacatgaaaagcgcaacattgttagtctataaggaaatgaaaattggaaccacaatgaaatatcactacaacccactagaatgactaaaaattaaaaacactataccaagtattgacaaggatgtggagccactggaatgctcatacactgctgctgggaatgcaaaatggtgaaatcactttgtaaacaatctggccacttcttaaaaagttaaacatatacctactattcaaccaagccattgccctcctaagtatttatccaagagaaaagaaaaacatatcctcacaaagacctatagacaaacgttcagagtagctttatttatacagccaaaaactatcaaaacccaatatcaataagtaactaaacaatttgtggtatatctgtacaataagaaggaaagaattacatatgcaacaatatgaatcaaactcaaaataattaagattcaaaaaaggtagaccttccccatgccaaaaataaaaaaaaaatacataatgcaaataatttatagaacagaaattaaccagtgattgcctggataacaggggtggggagttgtggggacttataaaagggaaaatagaagcttctgggttgatggatatgttcattatcttgattgcaatgataatttcatgaatgtatacatatgtcaaaactcatcagattgttcactttagatgcagtcatgcacctcctaatgacattttggtacatgacagaccacatatatgacagtggttccataaaattataatatatatatatatatatatatatatatatatatatatatttttttttttttttttttttttttgagacggagtctcgctctgtcgcccaggctggagtgcagtggcgggatgtcggctcactgcaagctccgcctcccgagttcacgccattctcctgcctcagcttcccgcgtagctgggactacaggcgcccgccactatgcccggctaattttttgtatttttagtagagacggggtttcaccgttttagccgggatggtctcgatctcctgacctcgtgatccgcccgcctcggcctcccaaagtgctgggattacaggcgtgagccaccgcgcccggactataatatatattttacatgtttagattatacaatataatatcatattttacatatttatattatacaatatagcctaggtgtgtaataggctatactatctagatttgtgtgaatgcactctgagatgttcacacgacaacgaaattgtctaatgacactgatattgtttggatttgtgtcctgcccaaatctcatgccgaattggaggggcctggtggaaggtgattggatcatggggcggatatttcccttgctgttcttgtaaaagtgagtgagttctcaggagatctgatcctttaaaagtgtgtggcacctctcccttcactgtctcttctgccaccatgtgaagaaggtgcttgcttccccttcaccttctgccatgattgtaagtttcttgaggcctcccagtcatgcttcctgttaagcctgcagaactgtgagtcaattaaacctctttgcttcataaattacccagtctcaggtagttctttatagcaatatgaaaacagactaatacagatatagcagtgtgaaaatggactattacagcatttctcagaatgtattccctttgctgggtgaagcatgactatatgtgtagtgtattataccttaaatatacctcaataaaaccgtagaaaaatgaaataaataaaaggtgacacattggtgatctttggctgcctttttcccatttgaagggctgtggcatctgtgtctatcctgtagtgctaactacagtggccacatgagtgccttcttttagtgccagcccctgagacctccaaagccctgtcatcactaggagggttctgctggtatagtcatttggtgattagcctgcccatccacaaagaactaacaaggcaataattgcttagatattgcacattggtgacattggtggccttgtcttgggtaatcttcatcattaagtatggattgagttacaccaatcattttagagtcaaaggcatagcttggaggtcacctgagtcccagtctgccaaatgacagtgtctgagcacatctttcatttccacagacccttgccatacctcatccttgagtctcatttcacatctttatttatacccctgatttcatgtcctgaaagcttatttgttttgacttttcagtgtctctttcctgacccatgatcagtgaaatcctgagccacataaagaccacaattcaccaagacagatttatttcccagaaagtctcttcttgagtataggttaagcatgggtttgagagttaagaatttatatggacagtgtttgggaagatgacaacgatgtttcttgacagatttttattatattttaacaacagctttctctatgtctgtatatattaaatttaagaaaacggtataatttatattatacctgagaggctgcctgctatagtagaaattaccacaaactttatactcaaatctggactcaaagcccatttgtgtagtttccagctatatgaagtttagcttgggcaagtttcttttgggaaactcagttttctcttttgtaatataggatacttgttgtaagggtttaataggctattttctttgaagaaccttggacaataagaagtcatagtaaagtggttcaaatcatgggatcagaagccagacagagtttcagtcttgacctcatcactgattttgtaacactctgtgcctcagttttcttgtctacaaaataaggataacagcatccagcttctaagggtagtatatgggtaaattagttaatgcatgtaaaacatttacaacagtaccaggaaaaagatggggactcaataaatgttagctaccatcattattattgttgcagttatttgttataatgtctgccacataatagctgttgggaaaatagaaggcattgttcatttaaaaccctctcttgttttaaacaacttctccctcctgcagccccttaagaatttccaaggaaccccaatattcttcagatcacagtaggaatgacacattctacatgtgtgttgctcagcaaagcaaatagagaataataactaatgtgagattgtaattatgtatatcagtgatgttgctttgtaaatcaaagctaattgattctgagtacttgctacttctttaaccctcctgccagctcaggagcaagcatgcaattttccacgtaaacagcaagggtgcttatagaaaaggtattcaaaacgagcagagtgccatctacactagagcaacatcgaggctagggatttaaacttatcatactgagttgcacccatggtatgtatgtatcttagaaggaggaacgacgtttcctcactgtaaacttagataagcacggcttcaccctctggcagccatcctttgacttttccttcagaaaatggtccaaactttttgaatcaatgattctgtcttaaccatcccctggcacactcctaaatctaatgggttcagtaatttaattggctgttatatgaatcagtattttcatttttctaaatgcctgattttcaaatttatgtttactcacactaaatttggcatgcaaatgtaattcttaaagcagaaagtaagaggaactgatgggtgtaggttaaaaaatgaagctagtaaagtttggctatccaaccaaaccccacacaccccatgatccctacagctgtccccgaagtatttcttagaaaccccaaatgttctttgactaacactttaaaaacttcttccctaaagttactttcttcactgaagcctctgtattgttgtatttgcatatctcatgaaaagcccacatccccgcgttgacttcactggtttgtgctttgatgcatttcatcatgttgaatttaagctgtctactttccaaagtgaaaaatccaaatttttcagtacttcaaaaaatccttctttctacccaacgatccatttctctattcatttaatgattaagaaaaaaagaacgaaattttcaagattctttaacccaaaaagataaaatggtgtctgtctgtagaattagattcgaagtcagataataaggcaaactcagagaaaataaggagagcttgaaaggaccctgaaaggcaaatctttgagagggagtccttgtatgctaagtggaatagtcattggattacaaatttgcagacctaggtcctcattaagcctgtcacaagctgcttctgtaacctttcacaggtcagttagcctctctggactttagggtaatccactatgctcacctcatagcattgatgaccccagtgagaagctacaaagggaaatggaaagattctacaaatggaagaaatcatatagtttttgtttttcctgaaaaaaaaaaaaaaaaaaaaagtagggggacttgccccctggagtttgaattggctgtggtttatctttattttcttgcatgcacaaatgcctttttatgtgaagatccttttttctttaagaattggaattgtggttgccctacttagagtcaaaaatgcctatgagcagccgcagccgtctttaactcctacacatatagccaattagggggatgtacgctcatcctgggccttagagaatcttcttctgatccttacagttagaacttcatgttcagagagctgcttagttattatatctaatgacctagttcagccaggacaaaaatgtgaaatatactttttctttctcctgtcccccaccacaaacacgcacacatccatgtgcatgatgtacattccttaagtacactgtgcacacacacatttcttttctccagaccctttgtgtcaaacattttacaattcctcctgccaagctttcatgaagttccagagtggacaaggaaatggccccagtgacacacatcagttctgatggatcattctgaccagcagccaagagtctccggaagagcatgaaagcactaggtcaccgagaaccagtcctttgggtgattaggtattttgcagacagtaggataaatcctcatcttttcctagttataggaagagatatgctttcccccaacagagaaagtgaaaggactagcccgctatcagtttccatggcaactcagatccactacctgcttacttcatcctgtcactgtggaagacttgagggaaaaacaacattaagcttctctctgttttttgtcaaatattttgaagggacatttcatagcatgagtctgaaacacctttttaggagtgaaaaggagaacatgagagagagaaaaagggggagcaatgagcctggggatgctggggacatatttgaggggaagagactgtggctgatgtggtcagtgccaataaaacagagagaggaggaaaggaaagcaataaatatgtattgagtgtccacttcaggcctggtgctgtgcttaataatgcacatgctgtggcctctcagagccctccgtctggaagagaaaggcaggtaaacaggctatgactgcatgagcagagctgccaggacatctgcacagggcacactgcaggcaggggcagaaggcactgacactggtgtttggagggatgggtggaaggcagatttctcttaggaaatgtctatgctagaatctaaagaaagtgtaggggagagcaggtgaaaaagtcctggggcatttctggttgagagagtgaaccatgcagaggccctgagaagtgagacacctcagcttggaagacttctggaagttccttccggctggagtggagcttgagagggcttagggcaaaaaatgagtgtggctggagaagttagcaggttctgaattacgacgtcacttattataagtcatgtttaaggggctgcaatttatctggaccgtaataaggagccattaaagcatgtgaagcaggtttgtgaaaacatcatacctgcagcagagtggaggatggttctgtagccaaacagtgatggtggagggaaagaggggacattctaaagtgaaacagtgtgggtcatggatgagacaagaatggcagcagtggggattaagcaatgtgtatgggttctggaaattttatgacttagaaccaacaatagttattatgggtgaaagagagaagtgaaaaatgaagtccatgttgctggatgactgagtgaacaatagtgccactcactaaacaggagtcagtgatggaggagcgggctggggctatttgcttgattaccaagaagccaggttgggccaggttggtcaggccaggttaagcctttagaatagcccttgtcaagcttctgtgtgagcttgtgtatgggcatgtccagagtctgaaacaggtgtcatggactactatgagaagatgacatgtttagcttaggacatggcatgagtgattctattatagaatgagatttcatgtagaccccaatatggggtacgtaagagcaaccacaacaaaacagttcagaacatctttttattctccatctttaatcaaaacctgcataccttctacacctttcattactgctacctgcccatgaaagtttggaggtgagccatacccgtaaaagaaggaggaaatttaatttcaccgttggtaatcgcaccaggaacttagctgttgtggagttcaacattctcattcgggctcagagaaatttacagcaagaatgctaaaggtggcacatggtagagtgccatgaagatagggtgtggcctatatgagtagttcctggtggtggccgaccagctggcaaaaggatccctcctgtgatccacacacatgcttacttacccctgttctttcttccaggaagtccagtgttaaactcttcatcatcttctagtggtccacagcttttcttcaaaggctgaactcatttttacatacagtcacatgagatcttggtttctgccattttaaatgccaggtatgagacccagccccacaactaggtgatgtgttcatcttaagcaagttgcttaaattctcattttccttctatgtattggagggatgatagtgacagtcgtgagccccaccccaccaggtggcaatgagggataaataagacaaggcctgagaaggaggggtggaaactggaacaggtgttgggtttcctatcacagtatgaggagggcagctgggttgtggaaagaagaggcatgaaccccccagctccttcttcctgtggccctgccatgcgtgtctagctctctctgggaagcatttgctcagagtaatcttgaaccatctgtaggagggtaacaagttctgagaagatagaattccttatgtgtaacagagctgtcactcccaggcatttcttctgccacatgaatgagacagtgaatgaatctctccctgcaccctcactgtgtgtcaactgtctaaggtataactttgagcacagttcccaaatatagtactttatgttctctccggtaatactaataactcacttctggagtcgcagaaagaacatggatttggattcaggctacctcaatgcacctctgacatttactaggttgtggtgttggataaagcatttaacttctgagggtgtctatttccttgtctgtacaaaagagatcattcctcccaaacattactatgaatattagaggtcatttatacggggggccaagtgcagggcctagcccagagtaggcactcaagcagtagctacattattttattcctaataatttataataataaaaaataagatgttatgctctccccagatgcttagcccaccctccctcaaacttgcatgaattactatggctgcataataatttccctcagtcctgaaggaagcatctaaattagtagttatgaaaccaattaacatcacagaggattggaaaaaaatcctgcctgtgactctagccttgtgactactcagaaatctcagccagcatcacttcagctggcatctggaagttactcctgcaccttgaagcacccctgcaggagccaggtctactgagagtgggcagccctctctgcaggccgagagcaggaggcaggagaactagagagagatgtctagctgggcctgtgctccccagcactcttttgtacccagtggctgtgtgaagggtggatgaagcgtatttggttttaattgggaaatgctatcaattgtcctgggctcatttaaaaatccattagtatcaggaagtggatagattaagcaatgaggaagggaaaagaaaaaagctgtcagcaccttgctttgtagggagcataccgcctgtctaagcttcactagcaagggctgtgctgaatgttaagaagcctgttaaagtcagtttcaagatgctggggagggagaggaggtgtctgggccaattcacacgaagtcctgggcaagcttattgttctcgcagcttccaaaagcggtactgcagtaatctacaccgcatgtttcagattcctgcagctgtttctggaagcctggcaactgtgccacccagctgtaagccacatcaacacctgcaaatagcgaaacccctctgcgctccccgccacaaccccggccgctttttttttttttttttttttctctctcaatgctcagctggacccagatacctcttcatcctgggagccatcagtctggctaagggtctatggtggacttgaggcaaacagggagaaggatgacagaaatgtgccagaagatgaattagaagagaaagcaaagggaggacaaagataaaagcaagctatgagaacaaaaaatgaaagacagctatgacagcgctgtgtattagcttcctagggcctctgtaacaaagtaccacaaaccagatggcttaaaacagcagacatgtactcttacagttttggaggctagaaatctgaaatcaaggtgttggcaggaccatgccccctctgaagcctctaagtggggatccttccatgcttcttccagcttctggtagccttaggtgttccttggcttgtggtagcctctctccaatctatcctctgtcttcccctggccacccttctgctgtgtctgtgtcttctaataaggacatattattttagattagagtctacctaatccagtaagacatcattttaatttgactacatctgcaaagtccctatttctgaataaggtcacattcataaatattgaggattgcgacctcaacatattttttggtgggacaggattcaacccacgccaggctgtttagaggactgctatctggttaattcagtacatcactgtagaaggccctgggaagcttgaaaaagtactaggaaggaatccagggtcacaaactgaaatgcctgcagaggccaggcaggtaacataataggttctagaataagaaaatggtgactgtcctttagcctggaatcattgggacaacaatgaactggagtacatgccctggataagagcaaaaaatactcagccccagctgttgtcaccttgtaggactgaggctcagggatgccagatcaaatgagaagccaagaatccagatttctatgtgaaatgtctcagttttgtttaaaacctaggcagctatttttttccccaaatatggtgcacaacaaactaagaccatctgcaaataaggcagagccatgggcagtcaatttgccaccactgctataaagccattggttcaaatcccagtcttgccacttgctgtgtgacctcgggcaatttacctcccatctctgggccacaatttccttttgaggaatgagatggtcttaatcatccaatagagtatggtaataaatggtagtgaatattcagaggtataggatgccaggcccacactaatatgcttacatattagtttaagcaacaaaacttacacgttggaaaattgaaagaccaggcacagtggctcatacctgtaatcccagcattttgggaggctgaggcgggtggatcatttaaggtcaggagtgcgagaccagcctggccaacacggtgaaatccagtctctactaaaaataccaaaattagctgggcgtggtggcaggtgcctgtaatcccagctacccgggaggctgaggtatgagaatcacttgaacctgggaggcagagattgcagtgagccaagatcacaccactatactccagcctgggcaatagagcaagactcagtctcaaaaaaaaaaaaaggaaagaaagaaaattaagagacctcagccacttgtcctgaacattatgtaagtggatcaattcaaagccactggaaagtgcctgccccagcctaacgctgaataattctcctcatatataacccccaccagggctccactctgagtgaggctgtgcagcatgtggttaaaagcatggcttctgtatgcagggatgtgagagagatagcatctagtgggtaagaaagacagcagtagagtggagacaaaaatcctggaatcctggcttgaatgttactgacaacatcagctaatcaataatgcatattctacatgtgaggtactgtcctaagagctttcatgaattattcacaattagtcctcattccaatactggaaggtagatataattacccttgtttcattaacaaggatacagagaagagctggattctagagttttaagtaaaatctcccaattcatttaaattatggcagtggaatcaagtatttttcaaaacactgtgatgtctaaactaagtccatgtgcaaattgggcccagcccatgggcagctatttcacaacctttggtcatgagctgtgggttccagaccaagctttgccagttttctgtgtgaacctgggtgagtaacatctactctctgaaccatggttgagatattccatagcttgccaaggtcacagagcttgtatgtgtcaaagcccagcatctgaacccaggcagtccagggtcactaagtttattggtggcatagtcttctataagtgtttctgatgcttttctgagacctttctatcaatcaggctacagatccagataggacacatgatgctgactcacctgcaatggctgatattcttaacaagttttaatgaaggacagtgaggatgaatgcaaatgcctggaggattgcatagatttctgtaaatatgaaaggtaaagaagagataggatggtccctcctgaatactgcatcagttggcctaaaattgcatcatggagttttgttttcctcagtcatgtgacaattttgattcatgccttaaaataagaggaatctggctttaatactgaatgatatttagtcttaaaaactccatatgaaaataaagctgcccagtggtttttcatatttatttttagcagaaaacctttttaaaaaaaagtgaaatcctacatagaatgccagcatagaaaatagaatgggctggtgttcatcatgttttactaaggcataacaataatgacaatggtaataatagcagcagcaaatccttgccttgggccagccactacttattctgagaccttacctgtggtaactcatctaagccttacaacaaccctttgaggaaactgaggcagagtgatgttaagtaatttgttcagggctacagagctcagtgtgggagtcaggcaggctgcccccagggcctgcaatcttccctgccctgctgctcagctcctcaccctggtacaccacaggggtgcccacatgagaaacagctgattccaaatgggagctgacagcagaattcgtgtctcacagcctgtaatttgtagtcaactttgaaatcgtcgtttgcatttactatctacggagacttaacatatgtaaattgtctgtctcaatagacagttacaaagacctgtcattgtacttcagtctcagctaatctgtcattgaaatgcttcatagggtctttcaaatagaaattcatgtctgcctcaaagcctaaattataactgagaatatcccaagtgttactctacaaatttggtgaaaacctgtccagttgttagttgtggttaggaacaaacagacccaaattttcttgtatttgtatagacaaaagtaaagcctcattgactgagggagatgggaatctggggcccgctgcctgcaatcttcctctcagcaacccatgaggcaactccagagaaccctgggctctgggaactcagtcagagagccacagtccccagccagatagaaacaaccttgtctgctgtctccgggaaagggagagagttgttccaacctggggtctgggagaaatgacagcattcagaagtagggtcggcttaaggaagtatggagatgcaagggacacagcaatcctgggcctctgagcctcaggccagagggtgtttccagcaccttctgagaatttggtaatggctcatctcagatttgcaaaggcactgctggtacctggtttgtctggaaccaggcataggtatttaattcgtatgatgaggctgaggctgacagtgtaaataataaattaaacctctcttgagctttgttttttcaatacttcactgataaaatatgacttttaaataaaatttggaacttaaataccaagcttctagagagttgaactagaacagatttctcaatcttggtattattaacattttggactggttaattctttgttgtgggagcttgccctgggtattataggatgattagaagcattgctggcttctgcccactacaggccactagcgtgctctccctcccctactttcgacaatcaaaactgtctctggacattgccaaatatcccctgaggtgaaggggacaaaataaatcccagctgagaattttgaatttgattatttcagaggtaatatttagctatagtcttataatcccttatagtcaaagataactttgaaattaaaagtttaactcaatgtatttttgtactgctaagcatatcctttgtctagacgccctggttcatagattgagaccaagatcatagtggtttgttgtcattccacttgctcttggccacttgacctcaagtcagttgctaaaaaaaaattagcttaataatcctgcattgattgacctctctaacagtctcctattgcctccaactcccttctttcgtcagatttttcttcccacaattataaaactggaagaaagataaatgtccagtgtcttggctgagacagtgtagctcacccagacaggttttctcttctcaagaggcatgatttattttttactttatatttttaaattgtcgttttcctgtcaacttgctccaataattcctgcttaatttccgaagggcttaagatacacaccctgtgtaagcatgtgggttaagagttgaaactgcataatcagaccacagcctatatttgaatcctggctcatccatccatgaactagtttcaggattgtgggcaagttcctgaaactctctgcttcagttttattacttacaaaatggggcagcgataatgccagtcccatagggttgtggtgaagatttaataaaatactgtgtataaagtgtttagtaaagtactatgcatatagtaagcattaaatacacactattacctctatcatctttgcgattataatgatttttaattatcacttcattccctttcctcctatttctgctgaaagtatctggaggtaacaccttcatgcagtcaagggattgccttaggaacttttgttgaaataaataatttcaaaaagcaattaaaacttatttcatcatacctttcaatcactctaaggtcaccagccaaaatgatcttagaactcatccagaaccagaaactaggaagtcccaaaaaatccccaaatcctccccccaaattccctaaacaactcttcccttcttttctttccttgtgcacctacatagggtctcccctgctctattcagctttccttttccagaagtagacactgccctcatctgaagtggctgcacttgagttcagaatgacaggggagaaaagaacgtgtttctttgacaatacctatttgctcagcaagtgaaaagcaaagacctgtatggaagaggtaaatcttaggtatagccaaaaatagctattgtctctttatcaccaaccagagtgaactccttgctgcctatgtgcccagtatgaggataaaagccctggtactgaggaagggttcagaggacttgctagcctttttttttttcaagtggcaaaaatttaagtttttattatggactcctgtgtcttctgtgcagacaaccagcagtgaaggatgtgagtaacagcattaggggggatgtcattagcatgcaatatagcactatgtctacacctgtgcacaggcttggatctgccatttactaaccatgagaaaaagattgtcatttgtcacctcacatatttcaagatactctcctatccattagcacagatggtcccatgctagctagcccttgcagtaccagaagtagatatcatttaacccaatagactaagagtcagagaggttgtcagttgctcaaaattacaaatcagttcattatagatctgagagtgacaactcaagcaagttatttgacctgttggatcctcagttttccatagctgtatttcttcctcatcgggtttctaatgattcagtatagaaataatgtttgcaaaacatgtagcccaaagtctggcacttactaagtgctccataaatatttctgaagatagtgattatttggaggatgataatgatgatatatgcagaacagtatatgaaaagaccctgcacagcaattagacctgacaagtcttagtctccagatctgtccctaattattaagttatcttgaattactgtctcaaattctgcagcagaattttctactgggctcatatggagttaatatcatctgcctctaattgcttataaagacactaagaggctcaactgggtaaaaaggacctttgaaaaatgtaacgtacaaaacagatttacctaataaatgattttctcattctttgcatgccattgttgttgctgttacatttcatcctggcaatggtagttgacaggctgtttaccctataagctcttgtagcccattcctagaaaagaaggaactgcttgaaaccatcactgaaggcaactcaaggcagagtcaagattaggacgcaagtcactgaccgccagtctagattatttctcactcccagaagggaagaactcctacagagactgatcccatcctccttttggacttcatagagagactagatatattgactaatggcattaacaaaatgagaggcatcagaggattctgtgtagccattctgtttgctaactttactgaagcatttcttcagaactatttgtctttccttctttttctagcacttcagggtaaaagagtgttcagaagctgacagccagtgatgtgcttactctatgcacagttcataaagcatgactgcttccaggagagctgtttgtacaagcctgggagaggactcagtctactaacagagacagcagagattgcttgcagaataaatatgcaacttattaaagattattcttgtatactgaatagctccctgatggaggctgaagcaaggggagtaaggattggggaggccatttctcttccatgaggttacaaagtcccattgagatgggagccaagttaattagagagctgtcaagggatagcgtatcttccaaagcagattgacaataggttggggatggaggtcagtcaaagatccaaagaattccgccactgctactgtttgcaatgcccaagtgaagaaacataactagtgcaggaactcttgatatttcagggcttcttgtactttgcaatcgctgaagaaacctgaggaaaggtggtgccaatgtaccattacctaattcagcatttgctttgggttgagaccacaggccattgctgatctgattatagaaaacaagaaaaaaatgaatctagtactgggattgtttagtcctggaaataaaagacgagatgtgaacccaatagcccttcaggtatttgaagaactctcaggggaaaggtgataatatttcaacatggctcctcagtggagagccagggccgataagcagaggttatagcaagctaaccccacatttggagagttgacaatttcagtggtccaaaatggaatggaatgctttgtgaggtagtaagttccctgctagaggtctctaagcacaaaatgctttacaaactgttctgtgagttctcctgaagttcaatgaagttatagtatatgcaaaaattagctttgacagtggaccctaaatgaaaattattgttggtcaaaattaattttgaaaatcctttaaattatctattaaatacaatatatacatgattttatttttcacaaccccagatagttaaaactggattgcctctgggggcaatgctgttaaaagtggatatcctacctgtatatatgttcccactttagcatttattaatgggtcttgtctgcaacagttattactatggtgactatggtgtttgcttagtgatgatttccattagttccccttcttcctcacttatttattcagtatttatttttttaaaaaggaaaagaatgttgggcacaatggcctgtgcctgtagacccagctacttagaggactgaggcagtaggatcacctgagcccaggagctgaaatctagcctgggcaacatagcctgggcaagactctgtctctaaaaataaaataataaaatacaattttaaaaaacaaaaacaaaaaacaggaaatgaatataaaatgtttatggatataaatgcttatggatataaaatgaatatccataaacaccagaatccctttcagtggggctagattcttggggattgaaggaatcatagccattcatatctctcacctatgttccctccagggcacggtctctgtgagtggatggaatggcaggattgttttcatgttgttagtgcacggaccttgcacatttttattacatttgttctttagtaattttatggagttttaatgagttatttcaattttatttttcaattgcccattgctcatatatagaaatgcaattgacttttatatactgactttgtattctgcaacctttttatctcacttattctatcttttaggattttctagcatatgttatcatgttgtatgcaagtaaagataattttacctcttttaattctatatgactattgtctgtttgtctgccttattgcactgcctggctaccctaatctaatgttgaataaaaattccgagagtagacatccttgccttgttcctgaccttaaagaaaaacatccagcctctcaccatcgaatatagatataaagttctgtgtagatatccttatcgggttgtggaaaatcccatccattcttagtttgctgaagattttaccataaatggaagttggatttcatagaatattttttctgcgtccactgaaatgatcacatggagtttctcctttgcgttattaatatgatgagttaaattcattgatttttgtatattaaatccaaccttgatttcctggaatacatcctactagatttgatttgccaatattttgttaagaattcttaacctacattcataaggtacattgctacagagtttccttttcctgtgatgtgtttgtctggtaatactaggcttataacattatttgaaaaggattcccttctcttttatttcctaaaggagtttatgttaaattcatcttattttaccttaaatgttacatgaaattcttaccagtgaagccatctatgtgcctggttcttctttgaaagttctctgttttcaattcaaatttttaattgacaaaggattatttgggatttttgttgttgtttcttcttcagtctgttttgatcatttatatttttcaaaggatttgttcattttcagttgtcaaatttattgcataaagttgttcataatgttcctttattatcctttcatgattgtagaatagatagtgcttggcgatatcagtattttatttcttctacctttttgagaaattaaatagtggcgtatcaattttaaaacaagattttgattttattgatcattttctgttttatctccatttcttatgcctcaatttttaaacttatatttattgtctttttccttttaatatgttgggtgtttaaatttgatgtttttctaattcataagagggaaacctagatccttgagttttcacacctttttctatttccaggataagcataaaagctataattatttctcaaacactcatttagctgaatctcacaaattttgatgtttattttaattatcattcacttcaaaatgttttttcctatttcttctttcatccaaaattatttagaagtagattgtttaattttcaaatacttaagactttcatggataccttattgctattaatttttaacctaattctatgttgtcagaaagcatactctgcatgatttcagactttttagatttattgatttttttgtcctaacatatcctgataagcatgtatccttgaaaaaactgtgcctgctggagttgttaggttatatgtctacaaatgtcaataagataaaggttgatagtaacgttcaaatcttctacatctttactaattttttgtctatttctaccaattgctgaaaggtattaaatatccaactataattctgggattgtctttctccccattaattttttaattgtttgctttacatatttttaaggtctcttattggatacatatacatttacgattgttatgtcttcctaatgattgatccttttaatattataaaatgcctcttcttttttctcatatttctcgtatagccaacctacatctttggttaattcctagatatttcattttatttgtggctattataaataggattttttatttctttttcagattgttcagttttgtcatatagaaatgctactgatttttttatgttgatttttgtatcctgcaactttactgaatttgtttatcagttctaagagttttttgtggagtctttaggtttttccaaatataagatcatatcttcaaacaaagtaatttagcttcttccattccagtttggatgtcttttattgctttttctggtctgattgctctagctaggacttccaggactgtgttgaataacagtcttgaaagtgagcatccttgtcatgttccagatcttggagaaaaggctttcagtttttccctactcaatatgacaccagttgagggtctgtcatatatggcttttattatgttgaggtatgttccctctatacacaatttttagggtttttgtcataaatggatgttgaattttgtcaaatacttttcagcaccaaataacatgattatgtcatttttatccttcattctgttggtatgatgtatcacatcgattgatttgtgttgttgacccatccttgcatcccagggataaatcccacttggtcatgatgtattatctttttaatgtattgttgaatttggtttgctggtactttgtcaaggatttttgcatcaatattcatcagagatattggcccgtagtttcttctttcgatatgtctttgtctggtttttgtatcagcataatattggcctcatagaatgagttaggaggtattcccatctctatttgcagaataatgtgagcaggatcggtattagttcttctttaaatgtttggtaaaattcagcagtgaagccatcaggtcccaggcttttctttactagtagacttttttttcttttgagatggggtctcactctgtcacccaggctggagtgcagtggcgcgatctcggctcactgcaacctctgccccccaggttcaagcgattcttctgcctcagcctcccaggtagttgggactacaggcgtacgccaccacgcctggctaatttttgtatttttagtagagacggggtttcaccatattggtcaggctgggcgaactcctgacctcatgatcctcctgccttggcctcccaaagtgctgggattacaggcgtgagccaccatgcctggcctactagtagactttttattatggctttgatcttattacttgttattggtctgttcagattttacatttctttctcgttcagtcttggtaggttgtatgtgtctagaaatttgctcatttcctctagattttcccatttatcatcatacctttgctcatagcagccactaacgatcctttgaatttctgtaacagttgtaatgtctcctttttcatttattattttatttggatcttctctttttttcttggtctggctaaaggtttttccattttgtttaacttttcaaaaaaccaactttttgtttcattgccttttgtattctttctaactcatttatttctgctctgatctttatttcttttcttcgactaattttgggtttggtttgctcttgcttttctagtgctttaagatgcatcattagattgtttacttgaagtttttcctctttataggcacttatagttataaacttccctcttagtaatgcttttgctatatcccataggttttggtatgttgtgtttccattatcatttgtttcaagaattttttttaatttccttaatttctttatttacccactggtcattcaggagcacattgtttaatttccctgtgtttacaaagtttccaaaatttctctttattgatttctagttttattccattgtggtcagacaagatgcttgatattatttcaatttttgcatattttaagacttgttttgtgacctaacatatggtctatccttgagaatgatccatgtgctaaggaaactaatgtatattcagtagttattggatgaaatgttctgtgattatctagtagatccatttggtctataatgcaaattaagtctgattttttttgttgattttctgtctggaagatctgtccaatgctaaaagtgaagtattgaagtctccagatattattgtattggggtctatctctctctttagctctaataatattttctttatatatctgtgtgctccagtgttgggtgcatgtagatttacaattgttatatcctcctgctaaattgacccctttatcattatatagtgaccttcattgtctcttatagtttttgtcttgaaatctattttgtctgacataagtatagatatcttgctcttttttagtttccattggcatgaaacatcttttttcatctctttattttcaatctgtatgtatctttataagtgaagcatgtttcttgtaggcagcagatttttttttttagtccattcaggccctgtatgttttttgattagagattttagtccatttacattcagtgctattcttgataagtaaggacttacccctaccattttgttatttgttttccggtgttttttttttttttaatcttctcttcctactttctttctttcctgtcttcctttagtaaagatgattttctctggtgatattatttagtttcttgcttttcattttttgtgtatccattgtatcttttttaatttgaggttactatgaggcttacaaataccatcttataacctattattttaacctgataacaacactgtttgcataaataaacaagcagctgaactcttctactatattcttacttatttttaattcattaatttttatacattctgacaatttctgctttttaactgaagtgtttacttcctcaatagttaatgtaattttaatatagttacgtcttagtctactattttgttatttactttcaacttgacccttctgtttcaatgtgttcttttgttgtgtttttattgagtagttgttgttcctcttttcctaaaatttttggatcatgttaataatttttaaagttttgttttaatttttatcttgactttttaagctacacttttcacatttttttcagtggttgtactaggttatgaatcttataaattaatataaactcttaacttttaatagtctacttagagtttatatgtaccactttacataaagctttgcaatcatataaatttatttattctcttctatactttgttctattgttacatgtattacatttacttacataaaaacccccagaaggtaatgttttaaataggcacatgtactataaactaattttttaacacacacaaaaagagtctcttttacatttatatagatatttaccacttctagtgctctttattcctttctgggaataaagagtttccatctggtgtcacttctgctatagcctgaagaagaatccttagcatttcttgtagtgcaggtctgatgcactacagtataggtaacaaattccatagttgttttttaatgtaacatatattttgccttcattccttttttttttttttttttttttgagatggagtctcactctgtcaccaacctggagtgcagtgacatgatatcggctcactgcaacctccacctcccgggttcaagtgattctcctgcctcagcctcctgaatagctgggactacaggcatgcaccaccggtggtgcccatctaatttttgtatttttagtagagatggggtttcaccatgttgtccaggatggtctcgatctcttgacctcatgatcttacctccttggccttcaaaagtgctgggattacaggcatgagccaccgtgcctggccttcattcttaaataattatttttgttgcttatataattctgagttgattttttttctttggctctttaaacatgttgttctaatcatttctggcccttattcaaatcactgttacatatatatatatatatgtgtgtgtgtatatatatatatatataacgttacatatatgtgttacacatatgtgttacatatatgtgtaatatatgtgtgacatatatgtaacgtatatatgtaacatatgtgacatatatatgtcatttttctctgacccctctcatttgctttttcccttaactttttatggtcattagcacatctatgtgcctatggctatttttatatttattctgcttgtgatttattgaacatcttgaatctgtaatttgtatcttttgtcaaatttgggaagttttgtgtcattatttctttactttttcttagactcctttcatttctttcattctgaaacttcaataacatatattagactattttatattatctaacaggttcctgtggcattgcttattcactctctattcttcacatcatacattggtaacaaaccaactaaaaaggaaatcaagaaagcaatctcatttgcaataactacacaataaaaaagacatagaaattaatttaaccgagcaggtgaaaatctctacaatgaaaactacaaaacacagttgaaagaaatttcagaagatacaaaaacatgaaaggatagtccctgttcatggatcaaaagaagtaatattgttaaaatatccataatacccaaagcaatctacatatttaatacaatacctatcaaaataccaatgatgctcacatctgtaatttaagaactttgggaggctgaggtaggaggatcacatgagcctcaggagttcaaggatgcagtgagttatgattgtgccactgcaccgtagcacgggcaacagagcaagaccctgtctctgaaaacagaacaaaaacaatgacattcttcatagaaatagaaagaaaaatccaaaaattcttatgaaaccacagaaggccccaagtagccaaagaaattctgagcaaaatgaatacagctagaggcatcccactacctgacttcaaaatatactacaaagctatagtaactgaaacagcaggtattggtataaaaacagccacatagaccaatggaacaaaatagagaacccagaaataaatcagcatatttacaaccaactgacttgacaacgttgccaagaacttacactgggaaaacatagcctcttcaataaatcaagcctggaaaactgcatatccatatgcagaagaatgaaactagactctcatctctcaccatattcaaaaaatctacttaaaacagattaaagacttaaatgtaagacctgaaactataaaactactagaagaaaacataggaaaagcacttcaggacattagtcaaggcaacaattttatggttaagatttcaaaagcacaaccaacaaaagcaaaaattgataattttattgctgtatcttcagatttactaactctttcctctgtcatttccattctcctgttaaatctgtccagtgaatttttaaattttggatattttatttggggctccaaggttaatctggttctttttcatttttccccatctcgctgatatttttaatcttttcattcattgtaagtaagcacattatcctttacatcattgaggtatttataatatttcctttaaatttcatgtcattaattccaacatctaggtcacttttttgtattggcctgagttaatggtcttttcctttgagaattggtcacatttttgggggtcttacctgttcaacatcctcgatataatgaaggttaaatatggagatgctggatcctgacattttcctataaagactgtaggattttttattttagcaggcacttaacttgattagaactgaactgtttttgggtgggcagtggctcccatcttagttcaaatatttgtttgtttttagttcatctttgagcctcgtccatgcatagacaattcagggtcaagcaaagatgagggccgacagaacttggagtaacctttctggatcttcccccttctttctatagtgagtatcgtccccagacttagttccctagttattcatatcataaagacagacatttttccaccagtactcgtactcttaaccaactgcactggcacccaggccaaaaccagcaaaaacagagaactcactccatgaaactcccattctccatacaactcccattctccacacaactcactgactacttgaccagattctacaactagatattaggggttcaaattcagaaagccactgcctcatgcccatgaaagactgtcttaatgtaaccttactaccagtcaaactcttgcaaagccattaggagcaggtacctgttcacttgccagagagtatcccccatgcagaaccaaattcaccagcagaggattagcctaggtacagcatggctgatcattatgacagaagattgggtcaggaccacatggtagctctgaacttaaacacattagaagcattttaattccccatctttactcacaaacggcaaacaaggctgactcatcttggtagctttcctgggtttaagacttttaatatttaaaatagactgaaaatcataatgagagaaactactgttgaataaaaaagcagtttctacatcttccccatagattctgtaatcaaaactattttcttggttaaatggtttatgtatctaactagagaaaagggggtaggaagacattatgggaaggttaatggggtcttacagagaacccagagaatggctgaaccaggtctcagaaaggacaggggccaggacaactccagcggcctcagcagcagaggctcaaggtccttttcccaagtgttctgccagtaaagtgacttcccaccaactctgggtctggagagaattcaattgtcttatctgatttgaggatgcattaaaatttaaccatgtccacaggggcgggtcatatatggaaacatggtgctgggactggaaaggtgcagttttcagaagaggggtactagctggacagacaccctggagagtgtctagaatatacaagggggccagaggggctactagaagagcagcaggacaacttcaaagaagctactttgtgggcagtgtgcacatgcaaaagaaaaacgctttttgtactcagtcatccagtccaacaacagagaaatattgatttttcccagcatctcattcagccctaagcatatatagcagctgtacttgctgtgtctagtatgcatcgttaacaactcccatcaggtggggtcggggggaagcacattaggaggccaatgaattcctggttgtgtagcctcggacttatgacttaatctttatttgcctcaagttcctcatctgaagaagagaaatatcgttccattcagggtagcaatgaaatgagacagcaggtagcaggtatgaaagttgagaacacagacttgaatctcatcagcaaggcagagccctggtcctgatgcccatggctgtggggccctgcagatgccttaccttctttgagctgcactctccacatctgtagaacaagaataggtaaactcactgtgggctttgtcagcattatatgatttatataaatcatcgtgcatagtgcctaacagctagcttaaatctgtggttaaaaactgtttttaagtgatggtgcttggaagaagaatttacagttgcacactgtgggcttttatattattgctgttagcatgaccgttatcatcagtgattcaaggaaccccaggttccaagaaacaagaatgaagcaagtatagcttcatagatatccttccttcttcaaaaatctcttcattgctatcaagtaagattaaaatgccttgacttgacagacaaggctgtccgggctctgattactctcttcagccttacttctcactctctctcctgtttccaccatctccccacctcactctacaacccacctgctcactatgggccattcccccaaacactctttatagttcaaatctctgtgtctttcttctttccattttctcctcttggaaagaccttttgacctatctctacctattgaaattcatgtttcgagtccaataaaacctccttgtaggccgttgctactgccactaccgttgtcacctcctgaattcatttactccttcaatctttgcttgtaccgctactctgatttagttagccttttgttttgtttagtctatttagctgcttccatgactcaattccctaccccattacaagcccctttagggcagaggggcaggcatctgtcataatcatctttgtaatccttgttagctagcgcagcagctgacacaaaggtggaacacagtagtcattggaaaggagaaaagaaagaaaggcagaaggacagaagaaattgtgtcatgaactgccctctgtggagctcagatatgtgctagcaataagcattagtgctatgctctgatgaaccaagtggcacagcccaccgagaatacccagaaatggaaaaatacacttctcccttgcattataagcttccagagagtttttaatcattccatgctgtcagattatgaaatcccagaaaatctgaagccctaaggggcctaacaataatgtaattattcagtatcttcatattgcagatgtgcaaactgaggccaagagagatttagcctctgttccccagagttattcagcaaatcagcagcagagctgagacaaggatcagggagctctgtggctgccatgtccagaccctccccttgttagcaacaaaccaccattcccaggccttgcttgattttcattttcctgggcttgacccacatacccaatttcctgctgtcccagcccagtgaagtagtggctcattccaggggcttgttactcaaacaaaaagagatgaaaacaacacattctgagagaataaagcagccagcaaaagggttccgtgaaacagtgaaattagagggagcccagtccataagaccaccctaaggtctgacaacaattgcatgtcttggggttccccaagaccaaaggtgtgaaaaattcactatcaggactcacagaactcactgaaagctgttattctcatggttaggtcttattacatggaaagggcaccaattaaaatcagccaagagaagagacacattaggcaggagccagggaaggcccaaatgcagagttcccactttcctcttcccatggagccatgggtgtgttatttccctggcatcagtgtgagacaacatacacagtgttgccacccggagaagctcccttgagccatggtatccagagtttgtattggggctctatcacatacgtatagttagataattgaaataagtgactaaagcaaagatctcaatcaatagaggtttgttaagccagcttcagggtgtatcggggaaaaactcaagccacacacatgtctgtggctatttttccaaataggttttcaggcagtttagtatttacacatttccttaaagaggggcaggcatccaagaagaagagacggtaggcagtaaggtgaatggttacattcttgtgagactttagttagtgcccagtaaatctacattttacataagataaggtgaatgtttgaaaagaaaaaaaaagtaaaggaagaatcaattacatagacttctctgggtaggtagagagctgactgatctcttgtctttcttctacacctgggaagataagcttgtaatgacattatcagtgtgaaaccaaacagatattagttttaggagcaagacttagattgtagacctaaagttacaattggtatgtccttgttcacaagaggccaaaaaataatttacctatgaatgatctgtggaggcagtcacacttggagatgcctgaggccttttacctttcctggtggtctggctaatgcataatgctagtaacagctactcatttggaagagggtgttgcatgactcaggctgtaggtttaaccttccctttggcataaggactttgggatcctgagattttttttaattttcctttatgggttgtatgaccacatagctgatttcagtctccaacacccctggaagttgagctgataccgtgggacccaaagttcccaccctaaaaaaacattgttaaactatttggcaggacccaacacaccaggcaaataaaaatgaaaacaccctcaggaataacattccaagggcttagagatgaccggaagccagggacaaaggccagacctcccttaggcaaggttaacttctttaccacactgaaccctgcatctatattcttcctgaccttctttacctttgttttcacaaagcataccgggaaatgcgtgtgctttggaatcaggcaggcctgtgtaggctgtaccacttatacctgtgtggcctcagccattcacttatgcctgtaagcctcagttttctcctgtggaaaatgatgatagaggtgcctatcccttgtggtgtttgtagggatcggcgttcatgctttcagtgtataatgtccaatataatactaatatgtagcaggtaccgtaaactcagaaaatctaagacaggtctcagttaatctggaaagtttattttgccaaggttgaggacccatccgtgacacagcctcagaaagtcctgatgacatgtgcccaaggtggtcagggcacagcttggttttatacatttttgggagagctgagacatcaatcaatatatgtaagaagtaccttagttccttccagaaaggtgaggacaattcaaagcaagtcccccaccccacccccgggggcttccaggtcacaggtaggtgagagacaaatggttgcactcttttgagtttctgataagtctttccaaaggaggcaatcagaatatggatctatctctgtgagcagagggatgagtttgttagaatgggaggcagatttgccctgagcagtttccagcttgaaagggcccaagatattttcctttcatagtacccaataaatgagagctcacacttgcagccttctcttcttcatctctcctcctcctcctccccccctactccttcctcctccccttcttcccccacccccttgctctctctgtttcccttttcaactctctatcttctctcaggacaggaagatgtcacttcagtgtgctgtgaataaggaaatgccaaatttaagggaaccagattcttgcagcagtcttgggatatcctgcctcccagagacagcacctgatggcatctgtttaacaaagctagctgtctagggctgggatgaacaggactcacactttgtaatgacttagctccactccaagtctggtgtaaattgaagatgaaaatgtgttttccaaaaatactcaggctgttgctgatgcctgggcctgtttcaccttggttatacaatagtcttgtctgtgcttctcttctgggcctacatggctgggcttgcatgccaggcaactttcctaagaaaaaccccgcacttatccctggtgtgagcaaacaataaactcaccatgcagagaaaaggtctaaagcaccccagagtgacattgaccatgttatgaagcaacgtcttagtgaggccatggaacttgcaccaccctgagttaggctcgcgcgtctctcagtggctttcctgatgcttcctagaattgttctgtggtttgggaaaaggcacaccttccccagactctcattccatgattgagattagccttccatgtttattctctccaaaaatgccttctccaactcccatactactccctgactacatgtccttctctctacagaattataatcaaaaagaaaaaaacaaaaaaattttggttcagggcctcggtttccagattattaaaaaatctgagtcacagattttgccatttccttcactccatttcttcccaccaatgtagcattcagaataatcaatggcaacaggctagtgcatcttctacctaagaatcccatagtaggccgggcgtggtggctcacgcctgtaatcccagcactttgggaggccaaggcgggcagatcacgaggtcaggagatcgagaccatcctggctaacacggtgaaaccccgtctctactaaaaatacaaaaaatcagccgggtgtgatggcgggcgcctgtagtcccagctacttgcgaggctgaggcaggagaatggcatgaacccgggaggcggagcttgcagtgagccgagatcgcaccactgcactccagccttggcgacagagcaactaaaaaaaaaaaaaaatcccatcgtaagcctgtgatgtatccagaaaattagatctaggtaagacgatgaaacattcatgcactgcccttattttactgcaagaactagagtgaagaaggtagttttccccaagtcacagacattcttagtgagtaaagcagggtaatcagtgaagacagaacttgagtgaactcaaccaaagattttgctttccgtatgttcaggttatttttatgactgccatctcttcaaactgttcttcccctgtaagtatatcctcctttcttcatctattttgcagtcattctttctcctgtttctttcctaaatcagacatcattatcttttttaatcttaaacttttttattaagtcagaggaataggtcttcttccgtaattcattaattcaacagatatttatttagtgtttcctacatacaaggaactattctaggctttctggaaaaagcaatgaacaaaacagacaaaagtccctgttttcatatagtttacatgctagtagtggaaagcaatggcaataagcaaacaaaaaatgtaaatgtatatattacatcagatgataaatgctttgaataaaaaaatgcaaggaaggaggacaaaggctcccagagtggagggaacttacagttttaaataggatggtcaaggaagttctcattaaaaagagcaagaaacagaggaggtgctcaagggaggtttgcaggtatcaagacagaggtaatcacaggtttgaagtctttgagggggcacatgacctgtgtgccctaacaacaactgggaggccattatagctggagcagactgaacaagagagaaggggaacttagaaagaggatcagagaagagaggaggggccagaatgtatagggctgtcagtattaactgcagagtaactaagggatacaaatacaaaggaattatagttagaattatagttatggtactttacttttactccaaacatataggaagccaatggagagttttgagtgcagttgagaaataacttgacatatttttaaggatgtggccaggtacactggccccttcctgtaattccagcactttgggggactgaggtgggatgatcacttgaggcctgtaggtcaaagttacagtgagctatgattacatcactgcatttcagcctgggtgacagagtaagactctgtctctaaaaaaaaaaaaaaaaaaaaaaaggaattatagcttctcaggtaaacttgtgtcatgggggttcatggtacagattatttcattacccatgtactaagcctaatacccattatttttcctgatcctctccctcctcccatcctccaccctccgataggccccagtgtatgttcttcccctctctgtacccttgtgttctcatcatttagttcccacttacaaatgagaacatgcagtgatttggttttctgttcctgtattactttgccaaggataatggctccatccatgtccccgcaaaggacataatattattcttttttgtggctgcacagtattccatggtgtatatgtaccatattttctttatccagtctatcattgatgggcatttaagttgattccatgtcttttctattgcgactcatgctacagtgaacgtacgtgtgcttttttaagcacagactcaggaggcaaaataaaagtgcaatcaggtaggagatatagtggtgacctggatcagggtagtattagtggaggcaacaagaaatagactgttatacattagtgtaaataacatggtatttcttgattaattttatatggctagatacaggaaaagagagcgagagagaatgaaggggagagagagaaataagaatgacacaaaaaattttgaccaacaactgaaaggatgaagttgccatggccatttggggacaaattatgcttactccctctgcctcaattttctcatctgccaagtgggggaaaataaccaaaatgatatggtgattatgacagataaatgagttaatacaagcaaaatgcttagaattgtgtctggtgcataatagttagctactgttacatcctcctcctcttctccctgtgtattccttcagagaactaaacacagtctgatatgatcttgtttattttttctttatatatctcctccaccaaaatgtaagcttcatgaaggcaatggtctcacctgtcaagttcatgccatatcaccagcttctgcaacagcatttcaaccttagtatatgctcgatgaatatttaatgcatagaagtatgaaaaggtaaaatagtcagcccagattttccaggacatctctcttgacataggcactgttcatctcacacacacatacttgtccatttgtgacttagaaaatgtggtcactgccattaagatgaaccacagataggttagatggttcatgcaggaagatttctgtgtatgctatgccttggcgaaaggaaaattctatctaaacacagccatcagtgaaaggtctgagattccatggacagtaatctcagtatgctctgtatgaagctgaaatcaatgcacctggttgttctgtaattagcagagctgctgccctgcctccactctctgcttccactgtcaaggtgttgctcatctctgggctggctttccatcccaagatggtttggcttgctgtgcatggctggagggaagcaggagagggcaaggacccaattagattgaaatggaatcgagtctttggaggccccttgtcagggtgaagagtgttggatgttcccagtgatggcagatgcttctttatttgggctgatctcagaggttagagatcatttgtaaatcagatttgctccatttggtatggcaagtcctgttttctgtgccttattttttttttaatccctgaatctttttccctgtgttttgacatgcttgctgccagcagaaaggctgtttggtctggaatgaatatttcaaattcttgggagcagctaaggtagcaaccaagtccataagggaatggatgatctgttcacgtggtgctaaaacaacccagtgggaagaatataggcagaacacatgacagtacgaatgagtacaaagtgaagcctcaataataatttcccctgattttagatgggagaaggggaaatgagttatattcattatttcgtctttaatttgtggttcttagtctttgtatagatgatattccagggaatgtaatcttcaaagaaataatatcccattctgagtataaacacaaattttaatccaaattatgagatgtttaacccagattaatagactcataagaacccgtgggctatctgaaatgtgtttgtttgcttggatatgtttagttaacagccacttatgacaaatacttcctacgaagcactcgttctaatgttttaaaaatattatttcatggaatcctcacagcccaagaggtatatattattattatccccacacaaagaaggtaattgagatcctgagaggttgagactcacagctagaaagaagcagagctagtatttgcatccaggtagtctggatccagttgtttgcaaaatgctataatggctccaagacaggaccagctttggagttgtttcttaattttgtcttattaagggagggcatattgaaaggaatcaggagcatctcatagaatctaagagccaagagagcagtcagccctgtgtggatagtaatcggggaatataaagtcaaaagaagtctttttagccatctgttctgtcttttagctcttcttcatgttttctttgtaagactggcctaggaacccactcatcagcttgaatgtggcccatcttagctgaccagcacagtagccccatcctcttagccttttccacctgcctctcacattttcctctcatcagtctcccagtcatctgaaactttaaagataatgatgactggcctaaatgacagagatttaaaagtttaattttcagaagcttcactggaaatcttgaggggcactgcagcagcctgttcagaactctttatgtcacacttcttcctttatgcagtgacacttgtgacaatggcctggggcctaaatgaggcaaaagtgagagcattagccctgatgtggcagtactagatatctagcagaatctattttgtacctcaaaaccttattttctttttgataaaaatcaatattgtaaatcaagtgagcatcatcatgatttcccacggatattcattgttcaggatgtattaacagtccatacggacagagcaccatggtccatgaaccccgaggtgttctgacatcctgttctgtgattcaaaaaaagcaagatgtgtgcacagtctccaacctatgaaggcccagatggcaactttccatgtttaaactgctttttattataaatatttacacacacacacacacatatgcacatacttcatgacaacaccaacttgtatttacaacaggcttacttactgcaaccaactcttatgccaattattcactgagggaattgaaatcagtccagtgtaatcaacaatagtaagaaaaagcaatcggcttagttgtgggagggaataattttttattgcaaacctttgtaagcagcatgcaaattatatgcttctctaccaaagctacagtgctgaccaaggcaacatttctctttcaaaaactaagaacccatgtggtaaaacatccaggaaggaattttcaacatgaggaaaggatggtttgagcttatcaggaagagagggctataaactcaaggaaaagctgcaaatgcagaaaagaagaaaaagaagaatcttccagaaaactgtgctgaaattgttgaaataagaagatagtcatcgcaaagaatattttatatcacacaacaaggatcaagatttcttggccaacgcctgattgaagaagctttcaggcatactgactcataagaaaagttgtaagagagctgactttaattttaattcagtccagaggaccctggagcaaagaaaagtgtttaagaagcttgttaagagacatatttcccaggaaagaaagccagtgttttcattttaaactccatcgcacttagtttttaaagcctctttaaaaagaaagaaaataaattatagcctttacattcagtgtttcatttttgctttctaataaatgttgcaaaagcacatattttggaggttattttccccttcatttattttcatgattagtgttggtatttttacggtatacaaagagttgccataagcataataccaattcataacatcacaccaaggggaaataagggcttatattacattcactacatttgccagcagaaaacaattaggttagcagttgcaattcaagtaaattcagagtagccataaaatcaccaatgccttgggaggagttacaggacatttcagaatctttactgaaggaagaaatgcaacttctttcctgccatttgttgatgctgcaattccatttgtgaaaggaaaaagtctaaccaccataatagctctgttagtttttcttgggatggcagaatcataggcctgagagacctgcatataaatcctgcctgggtcttttataatctgagcttcaggaagctgcttaaccttctgggactgagtttcttcattggaaaatggtaataatcacacttcccttgcaaagtgatggtaagtattagagataatctactcaacagcacctggcacatagaatggacgaaataatggccatattattttacttttcctaatgaggacaataatatttatagtagagttttgagattatgttcaaacaagtcactggctctttacatacggatctcttgaatgtcctatgccattccagtccattgttataaatctctgtttttatttaataactcatttccattcaactcagcaaccattcagcaagcactactatggacacagtgctaggcaaggcaaggcatacaaacacaaatcatgcattggcctttgccctccaggaactactgggttgttgcaaaagtagttgcagttattgccattactttttttgagacggagtctccctctgttgcccaggccagagtgcaacggcgcgatctcggcttactgcaagctctgcctcccgggttcacaccattctcctgcctcagcctcccgagtagctgggactacaggcgcccaccaacacgcctggctaattttttgtatttttagtagagacagggtttcaccatgttagccaggatggtctcgatctcctgacctcgtgatccgcccgtctcagcctcacaaagtgctgggattacaggcgtgagccaccgtgcccggccgccattacttttaatggtaaaaaccccaattacttttgcaccaacctaatacagtttttttatttattggctaattgttccgtcccagtccaaagaactctgacgaacttcaatcctgttgagtttacttattcctttgtttattcatctgtttattcaacatccaagtttgtgctatgtgccgggacagtggcggatcttgaaccagacgtagtccctgttcacgaggagcactctagagggttactagggtttggtttgtccctaccaaaactcatgttgaaatttgatccccagtgtagcagtatgggaggtggggtctgatgaaaggtgtttgggccatggggtcggatccctcttgggtggcttggtgccattcccaaggtagtgagtgagttcttgctatgatgatactggattagttctcacaaaaatggattagttcccatgagagtgggttcttataaagccaggacacccctggggttttgtctctttgtgtgtgtaccctttccctatgtcttcttcaccatgttagcatgcagcacaaaagctctcaccaaaaagcagagctatgcccttgaacttcacagtctataaaactataagctaaataaacttcttttctttataaattacccagtctctgatattctgagaccatggtattgttagagcaacacaaaatggactaagacaaggagaatgcagagtgattaatgttccaggttggaatccatacttgtctgacttcagaactggggcccaaatctgccatgctgtactgagacatttaatgagctttattaaaatccagtcacacaccctgcttcatctcctagtagacttctaggaagggctttctggtatgtacccaaaactagtcacctagtttagatttgggaaagaaatggcactagggacgtcagtgtacgcatccaattcctggccaaagtttctacctcaagtacattgctgctttctgccctgcagaggcaagaccatgaataacaaaatgcttaagcagccctcctatttctttagtttctagaccaaatcctctctctgagcaattagccccttgcttgctttctccttgatctcagcctggctggccctctgtggccccccaactgagatcccaccaagtacagggtaaatccaacctatgttttcattccagattcagcaccccgccttatcccttgtgactagttttgggtacataccagagagcccttcctagaagtctactaggagatggagcagggtgtgtgactggactttaataaagctcattaagtgtctcagtacagcatggcagatttgggccccagttctgaagtcagacaagtatggattccaacctgaaacatgctcccatgaattgtagggttttagggaggatatttaactttactgagccctagtttcctcttctgtaatatgggaataacaatagttttagcgccagggatcttgtgaggattaaataaattcatattggtgaaaggcttagcttagtgtgtgatatttgataagctctcaaccaatatatcaccgttaaagcaggtgctctccaaaactgcttcactttggaacaaactgtcccaagttcactgagggcttgaacttttagcagggaaggcagttctcagggattcagacctttttctacaggaagagagaaaattgagacagaaaaagagaactgaacaacagaagaagagaattggagatatacatacgctccccaaagacacaccaggctttgccctctatccaactaatcaaatttgaacattatatcatttttgttttagattttctttgaaaaaatttagagatatagttgaagtttattgtgtattctcctccaattcctctccttctccaagcattactgttgtcctaaacttggtattatttccacacatgtttttctactatcataagtatatgtaaaattcaaaacaatatagtttcacataaagaatatgtagcattgttttaaaccttatataaatagcatttataactgaactgttagttgcctactcaatattttcttttcttgcttacagaacttgcaatttattctgatcaacaatttgcccagctaaagtactacatctgccccctcttcctgtggctgtaggggcacagcaaaggtcactggtctaacctccttaaagggactccgctaacaggtatatcttttgcgttgcttccccgtttctttccttttcctatgtggaacatgactgaggtggatgtagctccaatagtcctttggttcatgacaccaccttgatgatggaaaccagagctaaggatgatggaacagaaaaaacggggtcccgcaggaccttggtgcctccatatcagccttggactacctacctctagatttgttttacatcataaagaaacctctaccttgtttaagccacttattgttgttgtttttgtagttgttaaatgtggctgaacctaaccctagataatggagactcatatgtatcgtcttcccagtggaactttttgctcaactttacattttgtttcctagcattctgtttgttttatgaggcaagcatagtgttaaagcaccaattctggagtagatgggctggttcacagcccaactctgccaccgacagctatgagacctttaaatacttaaacttccctgcttcttactttcttcatctgtaaaatggggatgctaatagtaccccccatcacagggttgttatgagagttatatgaattaatattgacatgcaaagtgcttatagtagtacttacagcaaaataatagttaacccttaataagacattattatatgctatgtattcatgagatatagtataattttaactgccattagatattctattatataaatatgttacaatttttttattctactctttgatggacatttgtttccatttttgacatttactgaatgatgacgtaattaatatttctgaagatctccttgtgcacgtgtgcaaattgcttcaaggtatgtatatagatgtgaaaatgctgggtctaagaacatgtgcactttcaacacggcttaataaaactaaattctggccgggtatggtggctcatgcctgtaatcccagcactttgggaggcccaggagagtggatcacgaggtcaggagttcaagaccagcctggccaagatggtgaaaccccatctcaactaaaactacaaaaattagccaggcgtagtggtaggcacctataatcccagctactcaggaggctgagtcagagaattgcttgaacctaggaggcaaaggttgcagtgagccgaaaccacaccactgcactccagcctgggccacagagtgagacactgtctcaaaaataaataaataaataaataaataaataaataaataaagcaagctaaattcttctcaaaatggtcacaaaaatttgtttatgagagtgggaggagccaagatggccgaataggaacagctccggtctacagctcccagcgtgagcgacgcagaagacgggtgatttctgcatttccatctgaggtaccgggttcatctcactagggagtgccagacagtgggcgcaggccagtgtgtgtgcgcaccgtgcgcgagccgaagcagggcgaggcattgcctcacctgggaagcgcaaggggtcagggagttccctttccgagtcaaagaaaggggtgacggacgcacctggaaaatcgggtcactcccacccgaatattgcgcttttcagaccggcttaagaaacggcgcaccacgagactatatcccacacctggctcagagggttctacgcccacggaatctcgctgattgctagcacagcagtctgagatcaaactgcaaggcagcaacgaggctgggggaggggcgcccgccattgcccaggcttgcttaggtaaacaaagcagccgggaacctcgaacttggtggagcccaccacagctcaaggaggcctgcctgcctctgtaggctccacctctgggggcagggcacagacaaacaaaaagacagcagtaacctctgcagacttaagtgtccctgtctgacagatttgaagagagcagtggttctcccagcacgcagctggagatctgagaacgggcagactgcctcctcaagtgggtccctgacccctgacccccgagcagcctaactgggaggcaccccccagcagggccacactgacacctcacacggcagggtattccaacagacctgcagctgagggtcctgtctgttagaaggaaaactaacaaccggaaaggacatctacaccgaaaacccatctgtacatcaccatcatcaaagaccaaaagtagataaaaccacaaagatggggaaaaaacagaacagaaaaactggaaactctaaaacgcagagcgcctctcctcctccaaaggaacgcagttcctcaccagcaacagaacaaagctggatggagaatgattttgacgagctgagagaagaaagcttcagacgatcaaattactctaagttacgggaggacattcaaaccaaaggcaaagaagttgaaaactttgaaaaaaatttagaagaatgtataactagaataaccaatacagagaagtgcttaaaggagctgatggagctgaaaaccaaggctcgagaactacgtgaagaatgcagaagcctcaggagccgatgcgatcaactggaagaaagggtatcagcaatggaagatgaaatgaatgaaatgaagcgagaagggaagtttagagaaaaaagaataaaaagaaatgagcaaagcctccaagaaatatgggactatgtgaaaagaccaaatctacgtctgattggtgtacctgaaagtgatgtggagaatggaaccaagttggaaaacactctgcaggatattatccaggagaacttccccaatctagcaaggcaggccaacgttcagattcaggaaatacagagaacgcaacaaagatactcctcgagaagagcaactccaagacacataattgtcagattcaccaaagttgaaatgaaggaaaaaatgttaagggcagccagagagaaaggtcgggttaccctcaaaggaaagcccatcaaactaacagcggatctctcggcagaaaccctacaagccagaagagagtgggggccaatattcaacattcttaaagaaaagaattttcaacccagaatttcatatccagccaagctaagcttcataagtgaaggagaaataaaatactttatagacaagcaaatgctgagagattttgtcaccaccaggcctgccctaaaagagctcctgaaggaagcgctaaacatggaaaggaacaaccggtaccagccgctgcaaaatcatgccaaaatgtaaagaccatcgagactaggaagaaactgcatcaactaatgagcaaaatcaccagctaacatcataatgacaggatcaaattcacacataacaatattaactttaaatataaatggactaaattctgcaattaaaagacacagactggcaagttggataaagagtcaagacccatcagtgtgctgtattcaggaaacccatctcatgtgcagagacacacataggctcaaaataaaaggatggaggaagatctaccaagccaatggaaaacaaaaaaaggcaggggttgcaatcctagtctctgataaaacagactttaaaccaacaaagatcaaaagagacaaagaaggccattacataatggtaaagggatcaattcaacaagaggagctaactatcctaaatatttatgcacccaatacaggagcacccagattcataaagcaagtcctgagtgacctacaaagagacttagactcccacacattaataatgggagactttaacaccccactgtcaacattagacagatcaatgagacagaaagtcaacaaggatacccaggaattgaactcagctctgcaccaagcagacctaatagacatctccagaactctccaccccaaatcaacagaatatacatttttttcagcaccacaccacacctattccaaaattgaccacatagttggaagtaaagctctcctcagcaaatgtaaaagaacagaaattataacaaactatctctcagaccacagtgcaatcaaactagaactcaggattaagaatctcactcaaagccgctcaactacatggaaactgaacaacctgctcctgaatgactactgggtacataacgaaatgaaggcagaaataaagatgttctttgaaaccaacgagaacaaagacaccacataccagaatctctgggacgcattcaaagcagtgtgtagagagaagtttatagcactaaatgcctacaagagaaagcaggaaagatccaaaattgacaccctaacatcacaattaaaagaactagaaaagcaagagcaaacacattcaaaagctagcagaaggcaagaaataactaaaatcagagcagaactgaaggaaatagagacacaaaaaacccttcaaaaaatcaatgaatccaggagctggttttttgaaaggatcaacaaaattgatagaccgctagcaagactaataaagaaaaaaagagagaagaatcaaatagacacaataaaaaatgataaaggggatatcaccaccgatcccacagaaatacaaactaccatcagacaatactacaaacacctctatgcaaataaactagaaaatctagaagaaatggatacattcctcgacacatacactctcccaagactaaaccaggaagaagttgaatctctgaatagaccaataacaggctctgaaattgtggcaataatcaatagtttaccaaccaaaaagagtccaggaccagatggattcacagccgaattctaccagaggtacaaggaggaactggtaccattccttctgaaactattccaataaatagaaaaagagggaatcctccctaactcattttatgaggccagcatcatcctgataccaaagccgggcagagacacaaccaaaaaagagaattttagaccaatatccttgatgaacattgatgcaaaaatcctcaataaaatactggcaaaccgaatccagcagcacatcaaaaagcttatccaccatgatcaagtgggcttcatccctgggatgcaaggctggttcaatatacacaaatcaataaatgtaatccagcatataaacagagccaaagacaaaaaccacatgattatctcaatagatgcagaaaaagcctttgacaaaattcaacaacccttcatgctaaaaactctcaataaattaggtattgatgggacatatttcaaaataataagagctatctatgacaaacccacagccaatatcattctgaatgggcaaaaactggaaacattccctttgaaaactggcacaagacagggatgccctctctcacaactcctattcaacatagtgttggaagttctggccagggcaatcaggcaggagaaggaaataaagggtattcaattaggaaaagaggaagtcaaattgtccctgtttgcagacgacatgattgtttatctagaaaaccccatcgtctcagcccaaaatctccttaagctgataagcaacttcagcaaagtctcaggatacaaaatcaatgtacaaaaatcacaagcattcttatacaccaacaacagacaaacagagagccaaatcatgagtgaactcccattcacaattgcttcaaagagaataaaatacctaggaatccaacttacaagggatgtgaaggacctcttcaaggagaactacaaaccactgctcaaggaaataaaagaggacacaaacaaatggaagaacattccatgctcatgggtaggaagaatcaatatcgtgaaaatggccatactgcccaaggtaatttacagattcaatgccatccccatcaagctaccaatgactttcttcacagaattggaaaaaactactttaaagttcatatggaaccaaaaaagagcccacattgccaagtcaatcctaagccaaaagaacaaagctggaggcatcacactacctgacttcaaactatactacaaggctacagtaaccaaaacagcatggtactggtaccaaaacagagatatagatcaatggaacagaacagagccctcagaaataatgccacatatctacaactatctgatctttgacaaacctgagaaaaacaagcaatggggaaaggattccctatttaataaatggtgctgggaaaactggctagccatatgtagaaagctgaaactggatcccttccttacaccttatacaaaaattaattcaagatggattaaagatttaaacgttagacctaaaaccataaaaaccctagaagaaaacctaggcattaccattcaggacataggcgtgggcaaggacttcatgtccaaaacaccaaaagcaatggcaacaaaagccaaaattgacaaatgggatctaattaaactaaagagcttctgcacagcaaaagaaactaccatcagagtgaacaggcaacctacaacatgggagaaaattttcgcaacctactcatctgacaaagggctaatatccagaatctacaatgaactcaaacaaatttacaagaaaaaaacaaacaaccccatcaaaaagtgggcaaaggacatgaacagacacttctcaaaagaagacatttatgcagccaaaaaacacatgaagaaatgctcatcatcactggccatcagagaaatgcaaatcaaaaccactatgagatatcatctcacaccagttagaatggcaattattaaaaagtcaggaaacaacaggtgctggagaggatgtggagaaataggaacacttttacactgttggtgggactgtaaactagttcaaccattgtggaagtcagtgtggcgattcctcagggatctagaactagaaataccatttgacccagccatcccattactgggtatatacccaaaggactataaatcatgctgctataaagacacatgcacacgtatgtttattgcggcactattcacaatagcaaagacttggaaccaacccaaatgtccaacaatgatagacttgattaagaaaatgtggcacatatacaccatggaatactatgcagccataaaaaatgatgagttcatgtcctttgtagggacatggatgaaattggaaatcatcattctcagtaaactatcgcaagaacaaaaaaccaaacaccgcatattctcactcataggtgggaattgaacaatgagatcacttggacacaggaaggggaatatcacactctggggactgtggtggggtcgggggagggggggagggatagcattgggagatatacctaatgctagatgacacgttagtgggtgcagcgcaccagcatggcacatgtatacatatgtaactaacctgcacaatgtgcacatgtaccctaaaacttagagtataataaaaaaaaaaaaattaaaaaaaaaaaatttgtttatgaaagtatccattgcatctcatctttgccaaatctcaactttaattagacttctcatttttcaccagtctgatgatggtataacaaggtaatttcattgctgttttaatttacatgtccctgattactagttaagctgaaaataactgtatgatttggagatatttggatttcttttctgtgaataacctgttcgtgtcattttttatttttccattgagttatcttttccttttcaaatttgtgtatctaataatgttacaaacatctcctcccaatatgtggtttacctttgcatgttgtttagggcacagaaagtttaatatagtgagatttatcagtttttcattattgatacctgtgccctaagagtttcctccctacctcaagaccataaggatatgctcttgtattttgttttaatcctcaccctatccctcaatgaggcaggtctttaatgcacttagaatttattttttgtgttgaagtagaaacaagtttttgttgtcattggtatatgagttattgatggtctcaacactattttccaaggggtctgtctgtctgtactgatttgcaaggccatatctgtcacgtaactagctcgcatatctacacgggtctgttgcctggctctccgatgtgtatcatttgtctgcttgctatcatggtgccaatatacactgtctgaatctcagtctctaaggggtctttaatccacgagataattcaagaaccttgcattgttgtcattatgcagataaatcagagtcaggatggatttttccctagacagacagctcttccatcatgacgtagaacaagtctcagtgccataggaacatagcagaagggcggaatagatttaactcaaacttgccttttacttctcttctcaatttataccctgtgatattacagattccaaacctgtacatgccttctaccaccatcagaggcttctctacatgattctgtactcaacagagccccaccccacactgctggacagcaaagccatttgtcttactaatggtccaaaggaaaggaaagctgcctagatgtcatatctatagcctggacaattaagaagcatttgtgatagagaacattatattggagatgtaaaaagtcaccaaatcctcacgtgtacaactctaaaaagattgagaaaattgaaattaattatccactcactagatggggtgttatctccttggctctctcatgaaaggacagaataaagttattagagattggaagggggcgggggttgagtgtagctacctgcacgtgttaatttgcttttatctcaatttcacatatcagaataataagccaaaataccctcagaaagaatgctagttttgttttaaaaatcagacaacaaaacctcaacgacaccctaaaaatgttgcagtggttgtcaacctccctggacaccagggaacgtcagtggatctgcctcagtggcctcaatcagacgggcatataaaaagcaatgcccagtggtttttctaaacatccatggtctcttgccaacaattgaggtttaatgaagaggggaaaactagacctcagagagtaagtcttctgaaggtggatatttcctggaggcatgtgcaactcccaacccccatcaggcattccagccgggggacatcactctatcattcttcttcaagcttgtagtgtctgattgatttatcgatgtgctgcttctctgagtctccacgggcattttgccattcaagccacaggagtacttaaatgccgaagcctgtgtctctactttcttcccaattcttttttgtctcttctctttcttctgtttctgcttctgtgggtttgtggtcttgtcatagcagattcttagtcattttgactttatagattctcttccactcatctgatattaataggcttttctttaagaaaaaacagattaacaactttggtctattattcttcagaaagatgtacttgaatttgtgtgcccctattcagaacataacatgcgcatattacaatttaaaaaaagtatgtgatattgtctcatggctatggaaagtctgtatcgagaaatttatttgcttgcaatttaatgagttttataataaccagagagtcccttcagcatctcaaatggagcaagaaagttgtgattggctgtcatcaagagaccagggttcctaccttaaaaagccagatcactgtccagcaataccagcttagggggtcctagatttgggggatcccactgtagtggaagagtcagaagaagtgtgactcacattagaaagttgctcagtattgtttcagatgagaataaagagggctgggcacggtggctcatgcctgtaatcccagcactgtgggaggctgaggtgggcagatcacctgaggtcaggagtttaagaccagcctggccaacatggtgaaaccccatctctactaaaaatacaaaaattagcgaggcgtggtggcaggcgcctgtaatcccggctactagggaggctgaggtgggagaattgcttgaacctggggggcggagattgcagtgagctgactcagagccactgcactccagcctgggcgacaaagcgagactctgtcataaataaataaataaataaataaatattaaaacaaaccaacagtccacaaatctttgacccattgagtcttttggtgccctgaggcctatgtgtcactgtgacactaaggccagtctctacttttctctaatttgaaatactttctaatttaagaagtgaaaaaatcacccaggtgaaatctgaatagtctgttgtttagttcattgtcctgtatcgatattaatttcttagtttttgaccaatgtatcttggctatgtgagattaggagaatctcaggtaaaggaactctctgtattatcgttgcaatttttctgtaaacctgaaattacttcaaaataaaaaggttatttttaaacaaactaaccagggcaatcacagatgactcaggctacggaggtaaacctaagtggaattctggctcacgttgaggtagaaaaatcaagagccaaggtgtctgggatgcacagtggggacctcattttaactctactactgactattcttgcaaccttaagccacttaacgtctcttcatttttattgtttattattacaaattaaatccatattaattatataataacacaggcaaacctcgtttcattgctcttcacttcattgaacttcctttattgcacttcacagatactgtgttttttacaaattgaaggtttgcagcaaccctgcatcaagcaagaacaccaccatgatttttccaacagcatgtgctggttttgtgtctctgggtcacattctgggtattctcacaatattttaaaccttgtcatttattacacctggtatagtggtttgtgatcagtgatctttgatgttactattgtaatcattttggggcaccgccaaccacactcatgtaaggtggcaaacttaatctctaaatgtgtgtgtcctgactactctaccatccagctgttcccccatctctctccctcttcgtgggcctccttattccctgagacacagaaacattgaaattaggccaataaataaccctacaatggcctctaagtgttcaagtaaaaggaagagttgaatgtccctcactttaaatcaaaagctagaaaatgattaaccttcatgaggaatgcatgttgaaagccaagacaggctgaaatctaggcctcttgcaccaaatagttgaccaagttgtgaatgcaaagaaaaagttcttgaagaaaattaaaagtgctattccagtgaatacacaaatggtaagaaagcaaaacagccttattgctgatatgaagaaagttttatagagctggatagaaggtctaaccagccacaacactcccttaagccaaagcctaatccagagcaagcccctaactttcttcaattttatgaagacagagagaggtgagaaagctgcagaagaaaagttggggctgggcatggtggctcacacctgtaatcccaaagtgttgggcagattgtaatcccaattgtaatcacacttgtaatcccaaggtgggcagattgctttagcccaggagttcaagaccagcctgagcaaaatggtgagacccccatctctacaaaaaaaaatacaaaagaaaatagccaggcatggcggcctgcacctgtagtcccagcaacttgggaggctgaggtaggaggattgcttgagcctgggatgttgaggccaccataagctgagatggtaccagtgtactcctggacatgcctggacaacagagcaaatccctgtcttagaaaacaaaggataaggttgggcaccgtggctcacgcctgtaatcccagcactttgggagtccgaggctggcagatcacgaggtcaggagatcgagaccatcctggctaacacagtgaaaccccgtctctactaaaaacacaaaaaattagccgggtgtggtggtgggcgcctgtagtctcagctacttgggaggctgaggcaggagaatggcatgaacccagaagatggaattttcagtgagctgagatcatgccactgcactccaacctgggtgacagagcaagactgtctcaacaaaaaaaaaaaaaaaaaaaaagatgaaagaaatgttggaagctagcagagattatttcataaggtttaagggaaaacagccatctccataatataaaactgcgagactgcaaggtgacgcagcaagtgctgatgtagaagctgtggcaagttatcaaaagatctagctaagataattggtaaaagtggctgcgctaaacaatgatttttagtgtagatgagtttttaatgtagacaaacaaccttatattggaagaagatgccatctacaactttcatagctggagagaactcaatgcctggcttcaaaatatcaaagaacagactgactctctagttagagaataatgcagctagtgactctaacttgaagccaatgctcatttaccattcctaaaatcctagggtctttaagaattatgctaaatctactctgcttgtgttctgtaaattaggacaacaaagcctagaggatagcacatctgtttatggcatggtttactgaatattttaggcctgctgttgagacctactactcagaaaaagaaaataaaaaaattttttcaaaagattactatttggcctggcacagtgtttcatgcctataatcccaactctttgggaagctgaggcagaaggatcacttgaggtcaggagttcaagatcagtctaggcaacataggcaactgtctctacgaacaataataataaaaaaaaaatagccacgcatggtagttcacatctgtagtcccagttactaaagaggctgaggcgagaggatcgcccaggagtttaagactgcagtgagctatgatcatggcactcccagttactaaagaggctgaggtgagaggattgcccaggagtttaagactgcagtgagctgtgatcatggcactgaactccagtctgggtgacaaagtaagatcctgtctctcaacaacaataacaaaggttactactccttaacactgcccctggtgacctaagagctctgatgaaaacgtacaaggagattaatgttgttttcatgcatgctaacataatattcattctgtagtttatggatgaaggcgtaatctcaactttcaagtcttattacttaagaaatacatttcataaggctgcagtcaccaccccccttatcagttaacagccataacatcaagacaagccaggcacagtgactcacacctgtaatcccagcactatgggaggccaaggctgatggatcacctgaggtcaggcgttcaagaccaacctggccaacatgatgaaacctcatttttactaaaaattcaaaaattacccaggtgcctgtagccccagctacccagaaggctgaggcaggagaatggcttgaatccaggaggcagaggttgcagtgagccaagatcgcaccatgcactccagcctgagtgacaagagtgagactccatctaaaaaaaaaaaaaacaaatatcatcaagacaaaactctccaacagcaaaaagattatgactatttttataagctcagatgatggctgacatttattagcaataaagtattttttaattaagctatgtattttttagacataatgctattgcacacaatagactacagtatagtataaaacatagcttttctatgcactggggaactaaaaaatgtatgtgactcacttcattgcaacattcacttcattgtcgtattctggaaccaaacccacagtctccgagttacgcctatatgtaattatatacataataaattattataaatatttcagaagaaagggcaatcagattcatctctaatatatggaaaaatgaataattacccacagtcacatcctccaaaccacaatttcatcacatatgaaaatccagtatgaacaaatttgcttctgcagatcttctagttgaccccaacagtttcagttccagtatatattcagttctagcatatgcaaatatcaagtcatttttaagaaaagaggaaactaaagggttaggtaagaataaaaatggtatatagaaaatagaggtggcataaactactattaaaagataaataatattgaaagcaggtgaattgtattcttagaagtgtaccttggttctactgggaaagcctttcctgagacagagcatcctgttacaagtatcttggccagaaattctcctgaacagagttaagaacttgtaatcttgtataatgggaaaggagtttcaaaacacttccccagtaattcaccaatctcaaaaattcagtttttcataattccctcagatcaaaggagacaaaagtcaaaagccctgagtcataaaatcaaaataatttttatttaatatttcataacagatgttagctacaaacaaaattaatttcaagtttcttgtgtcaggagaggcaagcattaaaaagttctgaggaggagatcccaagtgaaattgcatcatacacattgttaattacatgaataagtgtcatttatattgacgttattttgcatgctaccgtggttgttttgcttaaaatgttttttgttatactcccaaaatttggtccaaaaacagggaacttctattatgatttctcaagttccttaaccacagttacttctaactggagattttgaggaatttaatgcctacggctgaaaagaaccattacaatacaagcccaatttacctcataggattatttggggaataaaatgagataatagaaataagtttctttgaaatatttttaaataattttaaattacaaattattgttttttgtttatcaaataagtgaagtatttcttagtgtctgtcagtcattgtacctaggaaggaggtgtaaagtgatgactgtcctcacaaggcaatagggtagaggggtaagtgctcccaggagcactgggggttagagtggcaactgacctcataaagtactggggtagaggggttactgttcccaggaggcactgaggtagagtagtgactgctcccaagaggccctcgggagaggggtgactgctcccgggaggcattggaatagaatgatgactgctcccaggaggcactggggcagaggggtaactgctcccaggaggcattagaatagaagggtgactgctcccaggaagcactggggtagaggggtgacttcccaggaggcattagaataaaagggtgacttctcccaggaggcactggggcagaggggtgactgttcccagaaggcattgggtagaggtgtgactattcccaggaggcactgggatagatgagtaactgctcccaggagacattagggtaggagggggtgactacttccagcaggcactgtagagggtagagtagtgactgctctcaggcagctctagggtagaagggtgattgccttgtagaatccctcaatccagacttgtacagaggttcactacccagaactaagggctaaaatgggataaggaagagtactgtggagcacacacatagcccctcaatcataaattagctaggctttttgagcatgggaagtgggttacagcatgctggtaatgatggtgtgtcagtgggagagaaagatggacacaaaataatttccttatgactagaatgtaaaagagaggataacaaaagacagggctgggaagaaagtctgtgtctagtttatgaggggaaggagttgtaaattatgtttaagttttgttccttatgctgtctgagggaaattaaaatcagagaggattttaggcaaggagatggcatgagtcgatctagagtttggcgaagtatttctgatttcactgtggaaaagagactagagggggcaaaactggcagcagagggacaaatcacgaggccaagtaagcacagctagagatgagagtggcctggatgggtgtgtggcaatgggtccagaggagagtgaagcaaacagacacacatgtaatggcttacaaccaacaggacttgataattgattggatatgagaggtaaaagaggaatcaaagtcttgggcaaccgaaagggtagggttgccattccatgagagaggtaatagggggcaagtgcagatgtaggggtaaagatactgaggctgtttggaggcaaactgagattgacgttctcaggagacatccaaggggcaatgttcaatagacagttggatctttcttgaaattcctccctactttgggactagaagtttgaaacacggagaccttttgagaactctgttattattaatctaataaaagaggaaaaataataaagttgagagggttctgctattttttggaagtgtgagaatgtccagcccaaagcacctatgaaaaagtaactcagacaaaacagaggaatgaaaagttctccatttctgaaaaaagaagcagctacttagcaattatgtgctgtgagatcacttacctttcatggagagtccaggctgccgtttggggaagaaatagtctgccctctggaaatgtcccttaacatggtcatgcatccccctggacttgacataagtcgaggtgagaattaaacttgagatgaaagtgctagagatgtatatgggtcttaaggattacttagtccaattctcccattttacagaggaagaaactagggcccagggagaatgacttgcccatggccacacagctggttagtgggatatagaagccagatatcttggcttgtcttaccttgtcctttaacgcttagatgaaatcacttgaatccccaacccagatcctaaggaacatccagtgccacttcccccacaacttctaaaattcctctgggacttatgtttttcccagtcatccctggttctgatttccagaattttctgtatttctcattctccactctttcctgtggcttttctttaatcatttccctttggcctgaaaccaaagaaggggacagccccttcttcatgacttctagacccccagtcaaatgatgcctttcatagttgacaattctattttgtgaagtttcactaacaattttaaagtaacatggaaggacattatattatattataatattttacatatttctaagtgaatattgactttttaaaaaatctctctgcccttttctgccaacacagacaccaaacctgctaccatcttatctctatttctcatgcttttgccagctaatttgccctccctttccctcccccttttccttttctccttaattcttgtccctttgccttttaccccaaatgctgattaaaagtatattccttccctaggaaaactctgaaggcagccactatcatatcagtttttctcactccatttcacaaatctggtgccacattctctgtgctaagccagatgcctagtccattaaggaagctgctccaaaatttcccagatcttgctccatgcctgcccccacctcagttcttccggggtgtactaattggtatgtaactcacagaccatggatatgtttgaagtgaactgagccagtcaatgtgtactattgtcttttaattgctttcagcttcatgaactttgaacaacttttatcacctctcagctcagcactgattcatccagcttctgtgagagatttatttacttttaattagatccaacttaattattttgtcagtaaaacataccaaaagaatctataaaacaatttttaagtgaaatcacatttctgcctagagggatgttaaaaatgaaattatgcatctcattttacctgtctctcacaaaggaaatattgcctgcactgtctttttatttcccaagatattttgcctttcattaggaagatacctgggagatcaggcttagaataaagggaagaaaatgggaaaaggtagttcgagttttcaagggagaacacataggtgagcataaaaggcagtgtctctccagatttgctatttggcaacccctacattagaatgacctaggagctggtgaagagtgcagattttccacccccatccccagaacttctgattcagggggtctgacatggggatgagaagtgaagcttctcatttgcctattcttgtgctttctggattcacgcctgcctctggctactcaactctctaattcactaattggctatttctacttccccaagacgcttgccttgtccttctcagtcaactgtgttttcttacatctctaacaacttctggtccttactgtctgccattctttcaatttcccattggtagcctattcagtacctttccatgtatatatatatatctcatctcccaaccattttattatgtcagggactctgcatcactgattttcctctctgcacttcaccttgtaccctgctttcagttctgggctccctttacaataccaatgtgtccaaatgtctttagcacaccagtgtgtgaaagatctcttctgtcatcaaagaatttacaacttctgcctgatagtagctataattctggtattaattaatcgagaaaatatataattgcaaatcctaccataaaattaataatgcctttgaataaaattataatatattaatctcaacagtatctgcgacacttaaaaatagtggcttggccaggagcagtggttaagaagaaaatggatttgaaaaatatttaaagggaaaaaatggataaaacttaaaaatagattggctgtagtaaatgaaagagaggtcaaaggttactcttaagtcattaaggtaaacagagatgctattcacggaaatgggtactcctggaactaaagtgaattttggagagaatccaagagttttacaatgttaaagttgaaatacctagaaaacaagtagaaatggcacataagcagtaggatattttgatgtaaagttcgagggagaaatccgagctccaaatacaccaaattggagactagcttgcaagataatttgtgagactctaaactctaatgaacttggcaggtgataaagtgtaatgtggcagatgagaaatattttcttgtctgttaaaaaaatattcatctttggaaatctgttggagtaaagctcttatgagttggggagctaggagaaaaccaatcgggggttaaaagctttaattgactcaaggactagtgatgagggctgagtgtggcatgctgaagatgcttgagttatggaacagactctccttccatctttcctttcccacaaaggcccattctataggattacatttatcatgtattttaattatcttctacagaactgcatcctttcattaattttattttaggtggttgctatttctttctcactctctcttttccactagtccccacttttaccaaccaaagacaacaatccccaccccaccccaccctgcatacatttcttcttaatgtttctttctctctagaggaagtcagcttctggcatcctaattataggacatgttttgtagcctgtgaataaggcacaatcacagctcttgttcttcccattgggaaggacagagcacttttttgtgctcataagaactgattccatacaagcagctatatgtagatgcctgtagctgagtacagtgcaaatgggaatgctaaagttcggccttccccaagtcttctagcctatccaaactccactgcagaataaggtctccgctaagactattcctttcccacgaaggcctcactgaattttcctgggcaggtccacactacaaaacttatggagggtctttcaaatggcaatttctgttttctggcatatttgtctgcaactagatatcttttttgaatctaaaatgtcatcaatttaataatactttgtgagtgtaagtaaataaacactaacatagcaattgtgtgaaacaatctagtttcaaaaatttattaaaatgtggaaaaaggacattttgtattctaataaataaagcttttactgaaatggattaggaagaaatgacaagttctacagagaaatcactctattccccttatctttgtttcttcctctgtaaatgggtttcggtaaaatcagtaaaagactaagtgatggtcattcctcaagcaaatccaatcaaaataagtagaaaaagcaaaatggataagaaatttatgatgagattgttttactgcaaatcattccttgatctactacaatgcttgggtgcatggataggaatctggctcactgagtttttttattgaattcagggttgatgaaaaacctgttgtttgttgttgttgttattgttttgactttgtgttgaggggaagaaacttgcaaaccatgttagcagcctttcctgcattagtaggtaagccacaaataatggaaatgactgatcctttctgggtgagtggtgatgtttctgaacctggttcccagaacagcaaatagagacatagaggtgtaggccaatgttgtcataagggatcaagagtttttattttaataaaagtagttcctgtcagtgcctattaaaaaaacatatcaatactgtcaaaccacttcattttggtattaaggtttagctcaaaaccaaagttaatattgaagcttttggccaggcatggtggctcatgcctgtaatcccagcactttgggaggctgaggtgggtggatcacctgaggtcaggagttcaagaccagcctggccaaaatgggaaaccgtgtctctacaaaaaaacacaaaaaattttgccaggcatgatggcgggtgcctgtaatcccagctactcaggaggctaaggcaggagaatcacttgaacctgggaggcagaggttgcagtgagccaagatcatgccattgcactccagcctgggcgacagagtgagactatctcagtgaaaaaaaaattgaagcttttgagaagtgagttcacctaaagtaaaatatattgcatttaataaaaatgctatttgggtgtggtaaaaattgagaagatgattcaagaatgactgtaatttgtgaaaaactgatatacttattgatttgaagatctgctaactccagactatttcttctacagtggttattatttgttaactagatatctaataggaaatcttttctttttttttcctgcgatttacacattttgtcctcagggtagagtgctttaaaaacgcctgtagttaactgaaggccaaactttttaaaattctaattcattctaatatcagggttttatattattttatcaataatctaagtatagattaaacttaattttatagatttttctcccatagtcctaacccactgatatgctttttagagaattgggtatggaggaaaaataattctctagtaaagacttatttctgctttttagcctacttgggtcttctatccattcttgaagtcaacatgtttactgtagccacagaagacttgcaactatggctttgtcttcctaggatgcttactttcagaaacacagcacatacacacacacacacacacacacacacacacactcactcacgcatatatacacacagtagtactccatccagccacctctcactcattccctgatctcagttcaagccccacctcttgggacacaaggtcccatccctctgtaatgtgctcactgcaccctctctcttttgtggtattaaataaaaattacaggaggccattgttttggacaaagctaggccccaacagactagactaaaaattagagtggagtcattttcactaaactaaaactaaattgttatcaaccttcagagaaatcaagagagagacataatttcccaaataggtcagtttcaattggtatgaaaaggaagttgcccctgcctttaatccttacaataaaagtaacctgatgttacccagtcagttatttttctattgttctgtttcctgttcctcccttacaaggaaactaattttgaaatgacgaaatcatttttgttttgtgtttctgctttcttcagccctttctataaagccaatctcctctgctcagctcattggaacgctgattatattttatgaaatgaagtgctgcccaattttagaaccaaaaataaagttaattaagatctttaaacctgttgtgattttgtcttttgacagtggcacttttcctggttggtgaatatatatttatttctaaacgtgtatgtttaaaatctcccagacacctaatgtaagctcaggcagaaagggatgcatgggtaggttttactcacctggtatataaacgaggattcaataagtatttgttgattgaatgaatgactagttgatttatcccgtaacagtgaaaatggaacttgctagagatggggtttatttgggctcattaaaatgaaacagaaaggaactggagtcaattggaaatgtgagccaggtaacgtggagaaagtttgggagagagaaacagaattcctcaaaaaactgaagttagcccagcttgttaggctaaaggtcccccatataggattgtcttcttatcatctagaggacattgtacctagaagagaataaggctggtgcttgagaggattatcacttcaagcctgaggtgatctgagtataaattagcaaaattaggtaatcctcaagttatttttagtgggaggtgccatttcaaaaatctagaatgagacaaaggctttacaactggaaggaacttagggagttcttcaggtgtgccccaccctaaactttctgcaggcagcaataaaccacacctcagataatgggattatgcaatccctctttgtttcctgttccactctcaggaagaagtattttatttggaggggagaggggcagtgggtcaaagagctgcctctagcccccagtttcggtccctccagcccacccttatgtgcttcggccagaatgatgcttggaatccgcactcacaatgtgtcatttccctggcactcttcagactctctcttgccctcagcataacagcctcagcaggccatctgaccctgggctgtctctccagcctcagcttctgcccactctttgtctcccgttccatgtactctacaccaggagtccccagtccctgggccacgggcccatagcagtccatggcctgttgggaaccatgctgcgcagcaggaggtaagtggcaggcgagcattgcctgctgtcagatcagtggagacattaaattctcataggaatgcaatgctattgtgaattgtgcatgcgagggatctaggtcacgccctccttatgagaatctaaggaatgcctgataatctgaggtggaacagtttcatcccaaaactatcccccaaccactgtccatggaaaaattgtcttccatgaaaccagtccctggtgccaaaaaggttgaagacctctgctctatgcaacacctcaggaacttcttcccgtttctggaactcgttcttctacctggagcactcttccccaacctctctacctagctaactcctgcgtttcttcaggtaactttaaataaatgttccttttcccacgagcccttccctgactataccactgtgtgtgtgtgtgtgtgtgtgtgtgtgtgtgtgtgtgtgtgtgtgtgtgtgttttctgacccatggaaacatcttgccctttacctctaaatactttggggtggatttcctaaaaccaagagtgtttttatgtataaccacaatataattatcaaaatcaggaaatttgagattgttaaaatgctattacctaactgtagtttatattcagattttgcccattgtccaataatgccctttatacctattttatcttcctctagtataggattcaaccgagaattatgcattacatttagtttttatttttagtttattttaatcataaacaattattttgccccttttttgaccatttacacttgaaaaacacaggccagttgttttatagaatagccccccaatttgaggttttttagtgtttctaccagagaggtaactcatgttctcaatacatcatatcaggaggcaaaagatgtcattttatctcaatatttgtgatactatagccataataggtccagcgcccaatatgtgcagcaaatcaatatgccaagatgtcaagttgcaggagaaagagatttaattggagggctaccgaataaagagatgggaggaaacctcaaatccacctccgtgaggagtttggggctaaagtttataagagttttagaacaggcagaagtgtgaagattgttgattggtcaaagagtgcagggtgaaatcataggacagacagatgaagaaactgtcctcatgctgattctgttcctatgtggggtcttcaaactggttggcgtcagctgtttcaccggacttcagaatctgaaaaacatcttcagcaattcttaaacaaaagctttatgattctaacatcagaaactcaatcttaaacaaaacccttatgactctaatgtcagaaatcctatctttaggagcaatggggaagcaaatggtcaggatctagtgactttcagttacaaggaagtaggtcaaagtgcagcctgattaatgcttagttatgactctatttctgtccagaattcttgttagccctgtgaggacagcttcaatacttgctttgatctctgttgtaaggtggtgtctgccacatttctccactaaaaagtgattctttttatcattataatgaataatattgggggaggatactttgaaactatataaatatttagttcctcatcaaactttcattcactaatttggcatccaagttatatctgctttacttttaaggaagctcatcttacatggttaaaaaaagtaaagactattcttatgataaatggacttttaatcctactccaccgaaaataactacatttcccacatcaatccaatctcttcatttaagaagatcttaccacctaatagtgagagaagtctgatatggatggcattaaccaaggcaagatttctcatttgcattttcaatgctattcataaattatcttttcatttccttttcctttgcagtaaaaaagaaatccatgaaggtgcattttttataatagcaaagaagatacacaatattatttccagcttgctaaatgttataaggttgcttttggtcacattatgataggcatccgtaattacatttaccttttcaggcttgctacaagggcttacttagtctctgaagagcttcctgcaggcttggggtctgtggactgaaaatcagttggattgacgaaagctatgagaagaattatgatgagggtcagatcatatgggcatcaggaaagtaaaatattaccatttaaactagaaataaaactttttttcctaagtgatcatatttaccatgacaagctgggtaattaattgtaagattaatagtacttgacattcactcatccacttattcaaaagaaaattatcctatgagcctactacatgagaaggaccattatatacaacttctaactttataaaatgtatctttgaataatatccttctgggtctttaagaaaaatttggccaaaaagaaccttgagagtttgcttgtagggtttatttaaaagagttcagaaactggaaactcctaggtaaagcagcattttttttaatcattattatactttaagttctgggatatatgtgcagaatgtgcaggtttgtgtacataagtatacctgtgccatggtagttttctgcacccatcaacccgtcatctatattaggtatttcttctaatgctatccctcccctagcccctaaccccacaacaggccctggtgtgtgatattcccctccctgtgtccatgtgttctcatagtgcaactcccaattatgagtgagaacatgtggtgtttggttttctgttcctgtgttagtttgctgagaatgatggtttccagcttcatccatgtccctacaaagtatatgaactcatccttttttatggctgcctaatattccatgctatgtatgtgccacattttctttatccagtctatcattaatgggcatttgggttggttccaagtctttgctattgtgaagagtgctgcaataaagatacgtgtgcatgtgtctttgtagaagaatgatttataatcctttgggtatatccccagtaatgggattgctgggtcaaatggttcttctggttctagatccttgagaaatcaccacactctcttccacaatgattgaactaatttacactcccaccaacagtgtaaaagcattcttattactccatatcctctccagtatctgttgtttcctgactttttaatgatcaccattctaactggcttgagatggtatctcattgtggttttgatttgcatttctctaacaactagtgatgatgacctttttttcatatgtttgttggccacataaatgtcgtcttttgagaagtgtctgttcatgtcctttgcccactttttgatgggattgttggttttttcttggaaatttgtttaaattctttgtagattctggatattagccctttgtcagatgcatagattgcaaaaattttctcccattctgtaggtttcctgttcaccctgatgatagtttcttttgctgtgcagaagctctttagtttaattagatcccatttgtcaattttggcttttgttgccattgcttttggtgttttagtcatgaagtctttgcccatgcctatgtcctgaatggttttgcctaggttttcttctagggtttttatggttttgggtcttacctttaaatctttaatccatcttgagttaatttttgtataatgtgtaaggaaggtgtccagtttcagtttctgcatatggctagtcagctttcccagcaccatttattaaataaggaatcctttccccattgctcgtttttgtcaggtttgtcaaagatcagatggttgtagatgtgtggcattatttctgagtcctctgttctgttccattggtctatatctctgttttggtaccagtatcatgctgttttggttactgtagccttgtagtatagtttgaagtcaggtagcatgatgcctccagctttgctttttttgcttaggattgccttggctatatgggctcttttttggttacatatgaaatttaaagtagttttttcaaattctgtgaagaaagtcaatggtagcttgatgggtatagcattgaatctataaattactttgggcagtatggccattttcacgatattgatttttcctatccatgatcatggaatgtttttccatttgtgtgaccagtggtttgtagttctctttgaagtggtccctcacatcccttgtaagttgtattcctaggtattttattctctttgtagcatttgtgaaggggagttcactcatgatttggctctctgtttgtctattattgctatgtaggaatgcttgtgatttttgcacattgattttgtatcctgagattttgctgaagttgcttatcagcttagggagatttggggctgagaatatggggttttctaaatatacaatcatgtcatctgcaaacatagaccatttgactctctctcttcctattcgaatacctttatttctttctcttgcctgattgccctggacagaatttccaacactatgttgaacaggagtggtaagagagggcatccttgtcttgtgctggtttccaaagggaatgcttccagctttttccattcagtatgatattggttgtgggtttgtaataaatggctcttattatttcgagatactttccatcaatacctagtttattgagagtttttagcatgaagggtgttgaattttatcaaaggccttttctgcatctattgaggtaatcatatggtttttgtcatggtgtctgtttatgtgatgaattacgtttattgatttgtgtatgttgaaccagccttgcatcccagggatgaagctgactcgatggtggtggacaagctttttgatgtgctgtaaagcagcatttctttgccacctgggcagaccatctgcttaatcaagtacttggtttcagaaaccaccaaatggagtggagaaaaagaaaagggatcccctatccccaactccagccatctagattaagaaaagccagctgactggacagtagcacagcccagtcacctcatggacaaatttcctaggaaagaacctctcccatctattctacttatcactctcctttgaggttccggccacaggtgagtttctggaaaatgtcatcagaatcagaaaatgttagcgccaaagaaaacctaaagaataggtaccttttcctttgttttaagatgtgtcccaatatatttttctgtactatccaatttgttcctcacaaaaatcttgtggaataagtatagaaagaatagtgttcctgatttcacagtgaggaagctggagatcagttgaaggtgaaggaacagctccccactaggactgaaccagagctagtcttctgacctgcagggtcatagcccagcaagccacactttagctatccctgacagccccaattaggccaaaagcacgtcccacccacttcaatgctcccatggcacgtattccagtgttaggagcatgttatttatgtgattatttgtttagtgtgtcaccctagaacatagggattctaacctcagatactcaatcttaaacaaaatccttatgactctaatgtcagaaatcctatctttaggaacaacagggaagcaaatggtcaggatctagtgacctttagttacaaggaagtaggtcaaagtgtgggttaagactactttcagtgtctaccctgcatggatgggggagaaatgaacaggccaacatgctgcacgtttctcctaaacatagctcctcctgtgtctgttttcagatcttcgcctgctgctggaaatggccctctcagtggactcatcgtggcatcggtggcagtggagagtcagagatggcttcccccattgtccatcggaaaccacaccgctgctctctccagagaaagggagacagagctacaacttgacacagcagcgggtcgtgttccccaacaacagcatattccatcaagattgggaagaggtctccaggagataccctggcaacagaacctgcacaaccaaatacaccctcttcaccttcctgccccggaatctctttgagcaatttcataggtagagatccacttgtctgaacaatactctttttagagaaagagtctcattctgttccccaggctggagtatagtcgtgcaatctcggctcactgcaaccttcacctcctgggttcaagggaatctcccacctcagcctcccaaatagctgggaccacaggcgtgcaccaccatgcccggcaaatttttgtacttttatgtagatatggggttttgccacgttgcccaagctggtctctaactcctgggctccagtgatccgcctgcctcaacctcccaaagagatgggattacaggagtgagccaccacacccggccaccaatacatattttaaacaagtatttaccacttagataaactcagagatgctaccctctgggggccacctttcctttaatatccaaatgcatttgtcttaagaagttttttcattcattctttcattcaacaaatatttgtcaggttctatgctgtctcaggccataagctgggagctagagatacataaaaaaaatggagaggcagagagatactgtccttattgaatatattgtctagtaaaagagacagacattagttttttaattatataaattgatataaagttgtaactacaatagatacttctaaggagaggtatatggtgctattatagtgaataataaggaaatcttggcctagttaagaaagtcagggaattgaagtacaacatgaaagagagactgcattacctgagtgaaaagggatggacagaagtcagcagaatgttcctgcagacagacctgtacatgcaaaggcactgtggcaagagagagcaagatgcacgtggaaaacttgaaaacatcagcaactcttttgagataatgtatgagatcattttaaattaaaagttaaaatatgtgcttatatatcaccctcaatattgtaattattattataagtgaccatttactgagcaactgctatgctccagagccctctgctgtatatcatgcaaatattataaatcatgtaatatttatgggacccctttaaagtccataatactatccccattttgtgcaagaggaaataagctcaaaaaaatcacacaacgagtaaataacaggaacagaatttaaatctagatggttttccattcctgagaataatcatctccagtctcatccataagcatgacaaaacaaactttggggacttagggggaaagggtgagaaggggagaggaataaaagactacaaattgggtgcagagtatactgctcgggtgatggatgcaccaaaatctcacaaatcaccactaaagaacttactcatgtaaccaaacaccacctgttccccaataatctatggaaataataaatacatctagatgggtttggcttcaaatccattaccataatgtttgaggtgatactgaaagagaaggtttaattgatcaaggccaaacagtagggaagaaatgggggagaaagtacatttttcttctccatagtgtttattcacacttcgcttgcccctccagatgggctaacctctatttcctgttcctggtgattttgaactggatgccctccatggaagtcttccacagagaaatcaccatgttaccattggccattgtcctgttcgtcatcatgatcaaggatggcatggaggacttcaagagacaccgctttgataaagcaataaactgctccaacattcgaatttatgaaaggtaagaaaaaccatccctgtgttctctcttgcaaatgggttaggcaaactcatcagcatagcctcaggatgagtctcttttcttcgattttattttcctaaattatttaattcactgattctcaagggggggtgatttcgacccctagtgggcatttagtaatgtctgaagacatttttggttgtcatactgggagtagggggtactactgacatctagtgggtaaaatccgggggttctgctaaatagcctacgatacacaggacaccaccggggaacaattattaaccagtcaaaatgtcaatagtgctgaggctgagaaaacttgtttaagttgtataagcactcatattattaagcacacagatgcagtattattaaaggtgagttgaaagcttaagaattaaactctaggatggctggattatcttgggagactaagttcaggagaaactctttggaggatgtcaggcagtgtctcccaaaccaagaaaatgtctgccattttaaagcctcagttgcttgggttgaaaattcttgcttttagaaccaggtaggttttaggacccagagttggtacacctgttcttggctgcccagggtggaaaaggaagacacctgtaggtgacgtctacattccaacaggtggagtctcaaacaagtagaaggaagtggcctggtggatacacacctgttctctgcaggctctttccttgtcatgtttctcccctggggtttgcagcctggcttttcatttttagtatccttctgaaagaagagagaaaaattttcagcaaagaaggcaagtaaaagatgaaaattaaattatgagaattaaaaagacaacattgagcagagatgaaaaaggaagggaggaaaaggtggaaaagaaaagaagacaagaagcgagtagtggtctctaacttgctctttgaaggatggtctcacaaagagaaccccaacagacatcatcgtgggaatcaaatcaagaccagcaagtacaccgtgttgtccttcgtccccaaaaacatttttgagcagctacaccggtttgccaatctctattttgtgggcattgcggttctgaattttatccctgtggtcaatgctttccagcctgaggtgagcatgataccaatctgtgttatcctggcagtcactgccatcaaggacgcttgggaagacctccggaggtacaaatcggataaagtcatcaataaccgagagtgcctcatctacagcaggtaaagcaaaaaactctggggaagtcttgggcccagcctgatctttttgtggctgctatcactgcagttactgtttgtagaagggatggagtagggagatatcattattttatttcagggaagctgttcagttctctacagtgagctttatagtctacaatccagaaaaaaggaggattgagtcagtcttttaaaattaggaggtctttatcatgtagcattttcttcactatttcaaatgtgtctaacatttaacagttttgcatatattctcatctcctcttaacccagtgtggccatgagcacatttaaggctggttgaggacactgggagggaagaggcatcactgtatttgggggagcaatggagtattgtgttaggagaagcacaacaggagacacactgcctgagttgaacagcctccagtacttactaactgcctgactttagacaagcaatataacctctgaaattcattttgtaattcctaaaatttgaacaattcctgaggtggttgtgagagttgcaggagataattcttagaaaatacttagcacagtgtatgacatacaacaaatgctcagtaaatgcaagctgaaattgcattatttttagaatgtcaaacccaacgtttccttcatcactaactctgtttttgggagttctccctgatgttgtcttaaccaaagcaaagactgcacaccacctgtcctgaagctgagaaaccttgttttaacttgtgtaagtgctcatattattaagcacagagatgcaatattttttagggtgagttgaaatctgaagaattaaactctaggatgactggactatctgatgtcattagacatttatttaatgtcattttatacatgtcattgttctacaaaggtttcattgagcaaatgactaaactaggttgtcaggataggacatgctctcacttggcaaggaaagaagacagagttagagtgtgtctcaactttgtgataacccacatagtcctaaaagaagcaagggagttgagtctgggctcacagagagactagagggacaaagcaccttcagagctagcagttggcagcctaagatgatggagtctctagcaggtaagagcttgacttcttgctgaagaaggaaaacatccatgtctcacaagcagcaccctaggccatctcattccttttgactctccagcccagttcagcagacattccgcactggctctggtccttgttagaatgaaagaggcttgcttcgaggtatgtactccagccatttaggcactgcttacttctaaggaggggttctcttctccaggggagtgaaaggtggccagcttagagctggctgctgaaaggatttatgagtcaaactccacttggaaaattgtagccaggggaaacctccaagatgagtatctaatacaatgactttagatggtatttaccaatatcatccaagaacccctgcaagaaactccatgttcatccctcagcagcaaatgagcttcttgtctctttgcttggagggacacagttgcacgtttagaaaaattaatctgaaggataatttttttttccagctagatccaattgtcttgaatgttatgagcacactggacagccagagttaacatttagtcgttcctcgcctttgaatatgaaaattataaagagaggatgaaatcactgctggggtgtgatgccttcctttgaaaaagcggtgtttgagaaagcattgtttttcttttttttcttttcttcttcttcttttttttttttttttttttttttgggggacagagtcttggtctgtcgcccaggctggagtgcagtggcgccatcacagctcactgcaagctccacctcccgggttcatgccattctcctgcctcagcctcccgagtagctgggactacaggtgcccgccatcacgcctggctaattttttgtatttttagtagagacggggtttcaccatgttagccaggatggtctcaatctcctgacttcgtgatccgcccgcctcggcctcccaaagtgctgggattacaggcgtgagccaccgcgcccggccgagaaagcatcgtttttcttttggcaccaatccaccgtcactttttgttttccaccttactgtcttgttttttttccatggaatatacacagtggcaagccaggaagctggtgcctcagggaggaatgcacgtgggctgcagtgagcctggtcctgttctcctcgctctgccagaatatcgcagaatcatggcctggttcttgggaataatctcagtgtggattagaccacagactcatctgtgctgggagctggcaggacctaggccaggctgctgttgttgtttccaaaatagcttccagggaacatcggaaaaccaagatgataacaatctagaaaaaagaaacattagtccaccagctcactggcagggaggagcatggagttttcatagcagtatttcccaaagtgtattcagtggaataacagtgacaaagaaatagtctccgaaaaaatacgtgcatggccaaattatatatgctggccctcctccaatggacccatagcccatgaaggactaagaaaagacacagcaaagaaacctgttcatctttgattaactcagtgttgctttacatttactgggctttggaaatattttttaatatctaagtttgggaatttttactttttcaagtatacaaaaataattggctacagggaccagataggtaattaaatggactgaatagtttataaaaagcagtattactcatggactgataaatggccaatgacagttggcatcagtgttaggaggcaatagggaatggtggtgactatggcaaagtggggaggccatgcatttatcctaggaggcagagctggtcacttagcttctgctaattgttattatgtagaagtacaggcctagtgttgttgccagattgtctgagctttattagggcagctaaaaattaatatttttatttgaaataacctgacttttaactgattttatattattttgtaactgatgtaattttttcaaacacttcagacctatttttttgaaacctaaagttctattttgcttatgagcccaaaaacttgcaaactttgcttcaaaatattctagaaatctggagtctctgcaaaagaataataagtttctttttttgttgatgcttttttgaggtgggcagtgggggcaggggtcttggtacgttgcccaggctggtctagaacttggcttgagctgtcctcttcaaactcccaagtaggtgggattgcaggcatgccatcacttctggccctaggttcttcttttgaagttcatcctcaagggacagagagagggtatgaccttgaggtaagaatgcaggcctgggaggcagaggcctgtagtctaggcccagatctcagactaactattaatagcttaggaaagtcatttaaacatatagacctcagtttccacttttgtgaaatttgggagtcagactagatcttgtcctgtgagatggactgaggaagaacagaacccatagccaaataaatttacacattaatagaataaaggttctaggatgaccctcagtaagtagcctatcagctttgtttaacccagctgtcagttgagatgttctttgccacaagtaggagaaacttccattttaacaggtttaaacaacgaagagacttccttggcttaagtcattacaagtgtcctgaggtaggagggtgatcagcatggttcaatcagcgtcctagatccagctctcaccaatccttttcattcagccctcctcagtgtcatcttaactctcagggagacttctctcatggcaacgaaatggctgcagcagctccagccctcacatctacatgtgatcatgtatgaaaagagaaagaaagacacttctggtagccatcttggaaggtcaaggaagcttactactccctagagcctcctcacatctcagtggcctcacttgttcatccctaaaccaatccctaggggcaagagatgggattgtactaactaggttatacctgagccacagtccccacccacagagcccagcatgaagtcagcttccctgaaagcctatgggccattccaggaagatgtaaaagccaaagtttttttaaaaataagatagtttccagcagaatgaggaacagatgttggagaagccacctcaatgtcctcaacactatcactttaaaatatttttgagacttgactctttgtaaattgctttccacgtattagcaggaatatacacatcttgggacattctatactatatgtccctaaagtttttccacctctgaagtggattgattctatgaaagaccccaacagaggaagctaagacatgctattaaatagataagtgttagttattatcttaactgatggatgctaaaagacatatccttttgccatatcaaggacacatgacagatgtcaggaaaagaatacaagatttaagaggacaatttttttttttctgggaagcaacataagaaattacatctcatgccctagccctatccattttatttatttcacctcaaatttacacatttgagcaactgatgcttttttttttcatttttgtgcaattgaatactagagcccttggaattttgctcatgacctaagcccatgcatcatccaccctagacttgtttatactgtgaggaaatgtctttttacaaacagcagaagccttgttgacagaattacaatcccgttagagcattttcttttaatatagcaaccgtgtttgtggtctaaaggtgacccattaatcagatttatggaatgacttcgaggagagattagcttcagaattgtattagtttagcttctcccagggctcagtttaatgaatctagaaaccataccagccacagatttgtatttttccatccagcttagtaaatttttatttgtattcagaaaacatgcagtacagagcagggaatgggaactgagggaatccagggtggttccttattgtaatgaaacctaagccctccacagtttcagcagctggtcactcacttattcatctattcagcaaattttaattcaagacttagtgtgtgcattgccatggcaaaccttatgtgccctcaaaggactctcagtctaggggtcacgaggaacttacaaatagctacaatgtcccacgtgcttcggtagcctacctgcaaagggacacagaagtgcagaggatgtggtgacccacccacctgcagaaacgtcaaggccaagggaagctttcagtaaaagaagtaaaatttcaggagagccctgaaggaggagcaacatttagccaggcagagggaacatatttcagctcacagcctgttcctgtgtcaatgaaatgttgtatgtgtggcttatgctggtattagaaagaccaggaccaagaaatgatagaaacttagtggaagaataatatagattatatatttttttaatctgactttttactgagacttggagcatctgtcttctgtaagtcaggcagctgctaaaataaacagctttctgacagcgtagcaccgagggcctagcctggcctggcctgcaacctgttttcttttgtctgttttcttttgtctgtgagtttgcacctgtgtcctcagggaaacctacaagggaggaagccagaggtcctgatcctggttatgtcactaattaactacatgacctaaatgaagccacttaagcagttggggccccatgtgtttcatctttaaatagtgatcataatatctctctggcatattttgtgaaaaggtgttcagatgacatataagagggcttgaaaataatgaagctatagaaataaacttcaggatgcaatgccacagggtgagtaaagcaatgaccttactggatgcttggcatggagggctttgacatgggacctgggcttttctcagagctgccatttaccaaatatgtggcctatgcagatacttggtcacttgagcctccatttcaacctatataaaatggggccgatactagcccctgactcccagggtcatgtggatccaatgagattatctttataaattgtttagctcagtgcctgcaccataagtagtactaagtaatttttttgttttttgttctgttttgttttgttttgagcccaggctggagtgcagtggcgcagtcttgactcactgcaacctctgcctcccgggctggggattctcctgcctcagcctcccgagtagctgggattacaggcatgcaccatcatgcccgggtaatttttgtatttttagtagagacggggtttcactatattgaccaagctgatctcaaactcctggcctcaagtggtcctcccacttcggtctcccaaagtgctggtattatggcgtgagccaccacgcccagccagtaattttttttttaatttccaatcatctcaagcttaaccttttcaatgccaaccccagcctgaggctttatcttttttgctgtgtgtcctacacatacaagggtggaattgctagttctatagttttagtgggaaaagccaaggacattcactgagccacagataccagtggacagggttataatgatttaaaagcaaaatctatgctttgcgctctcatttttcctgctagtctatgtggcagaattttaaaatctgaattcagcaaaactgtctagaggttagccctctttcttttatttctggccacagcacacttgaacatacccacaccaagatttagattcagaaaagggatgtaggtggcctcatctggctcatagcctcagccacttggtccaactcaacttcttaacatagactctatgttagaatatcatatttgtacagctgttaataaagctgcaatttggtactaatatttcctctgaataacagccctcaaggaaacccccaaaagaagatgaactgattgaccaggcagaatttaagctttgccagggctatctgaacatcaaaatacagtcataagcctatctttgccctaaaagtatattctggggttgctgcctgcaggtattaaatgagttactgcatgtaaaatgcttagctttgtgcctgtggcactcataaaatgttagcttaaatattgctaaggagagttcggtagccttgataggcagaagtcatcacgagcttaacccaaggggagtaagaaagaatgaccacaggctcgagtttggaactgcatgaaagaagacaaaaaaatctttaaccatagaactcgactccaagctctaataatataacaaaatgggcctcggggaggactctgaaaaatgcagacaacagaaaaacatccattatcattcctggctatgaaaagtgcagttggctggacttacagaccagcagaccattgcatccagccttcaggcctttgctctacacttggcaccaacaaaccaggctcctttctgaagcatccattttgcaggtgcccatgctactcccactgcctcaccctgtgctcacagaaggccataaaccatttgggcgaattcagcttgtcatttcaggagagaatgctttaggtcctccccaaaactcactgggtgggagagtcataaaacaagaattcaggtgtccctgatgctccgcactcttgtcatcaggcatgatttgtatgtccacgggtaaggatttatggcctctgttttgccattaaggagatcagaattccaaaaggtgaggctcctgttctcaacccaacctctgctaggtttatgtcaccttcttctgaggctcaatcagcttcatgcctcactccaaaacagagccacgagaccatgctgagccatgtcactcccaccaccatcactcatctgtccttgtagacacacctgtgtgaccttatgcaagttagataactttctgagcctgtttcatcatctatgaaatagggataatgataaaaataaaagctattccattattaggcagctaacctgtaatggaggttaaatgctgggttcattataggtagtcaatacatgtaagctaataatttaaaatatcattgttagaagtctccactagggtatctataacaaagatgttaaaatggccaaaggttaggaaaaactgcctttctactacctgtattcaagaaaaatatacaaggaatcaattgatatttactaaacactccccatgtgctaaacactatacccaaccctatgtgcatatagaaatataagacccaggatcatcgcagctcttagcaagcttcttacgtactttaaaatagaagatgcacacgacaattaggaaataggatggtaatatacagggaagtgtggcaacaagatgtgcaccgtcatgtccagtgcccaggagtgaaaagagaaaggcagcatttggatctgcagaggttaaaggatgagcatttgggaggcaattcatatccttgaatacccccaggctgaagaatcgtaacccatggctatgatcttgctggatggcacctgtgacttccatgtcctctgaagcactgtgtttccatggccatcactgcttagtgacattctatgtgcagttctgctttctttactgccaccacatggtcaaaaaggtcaggagtgggttatccccagacctggggcttcaaacatcctcccaatataaagaactttatactgtattaatgtaacccaaatgttccagccctcactagcttctgggtatgaatgaggtcccattaataaaaacgtcccagtgaccatgccattcagctccaatctgctgacttagaacctcagtcctcccaccctaatcctcagctctccacagatatatctaggcatcctcagattggtaaatatcacatgtgtcctccactatttccagcccagccaggggtcctggtcgccccccctcccccacccccctgcttctctggcctcagctgtttctttctggtgcttccctgagccctgcaagtctaatccacctccccaaccccattgtgatctgtaggtcacacaagttgtaagcagagaagccaggattcaaagcctctctcaatccctatgctgcagtcactctgtcgggcattcctctctcaccctgggttagtgacatggcactgagcattctgggcctggcattcgagcttcctgaaggacagccaggccagctcatcatcctgtgtggaatgggaagttccacaagttaactaatccttctgaaaaatcccctctactctagttgcctgaaactctcttaataaaatccagatgcttgagaaatggagccttcagcatcctctcctccctctatttcgcctttcacctgctcccccatggcatccagttggctacaaacctctcttgctgtttatttacctcttaataatccctatctcctctcagaaagccatttagcactgcaccacttaattttcctcgtggcagaatctgccagatggagccttcatcccgagccatgttgatttgtcttatttttaaacagcagtgaacatggcataaaactaaaatagcagtcagttcccaggtgtggaccctctagtagggggacagtccagggtgtgtggatgtttccacctggggcagctgttcgaaacaggctggattaatgagagaatgacttctgcaggcggctcctggccagctgctggtctcccctgggcttcactccatgcaagagcatgctgcttttctgtatcagcaggattcggccagtcatcacctcccctgactgaacccccttgggctgtgtgcatccctgacttttccacagatatggtcctgacagtggaggagacaaagtagatgctagagaatcagcataaagtggcccagggcaagaaggaaatatccctgatctcattttttaatccccaaaattcctacaaaatgtgtctctgattccataacataactaagtttagttactataaataaaatttttcaaattttgtactggccaaactactgaactatgtttcccctaaactttttttttttaatgaatgctcccaaagtcatatggatctcatagctttattattcctagatgcctaccagggtatcctggaggtatgtgtgcttctgtttgagaagctcaaccctggaactgggctatctctgtcttggggaaggcaaacccacaacagtcactgagaatatttcttcaccactgcatgcgatcctaaggaagagaggattatgtctaaagaaaagacaggcaattataaccagtagagcagtgacctccttgggatccagcaagtaatgtaaagaagagagagactagtctgacttaccacttgtgggtggctcctttgatacttagatcatgacaggacttgacaggacaatactccagcccagctcacagaagtgacagctcagaaaaacacatatgccacaagctcctctccatagcactccatcttccagcacctttataatccacattctagaataagcagtgcagtcctttattacaaagggggagaatgagattcagtgttcatgggtggaggtgcattggccttgcctttgatatgcctctgtatgcagatactggccaacgagtatttatcaaaaccagtttgctctgggagggttggcgatcaggatttgctcagagtggaaggtgttctccctgaatccaatctcaaatactgggtagaatgctgagattatagcagtcaactgataccccacatccccaaaggcattatccagtaggacacagaagccaaagaagggagaaaaaaaaggaagacaagacagaatgagtgatacattctttgttccttgggacaattttgctataatatttaagaacactttaaagcactctctcaaaaagaaaaaagaaaaccagtctctccttcactctatgagattcttttctcacagagagtatggaccattccaatgcctgtaagtagccttatacttggatatttaacaggttttcccagggctactttgaagaaggaaaaatattatcccctgagtcagcagagagaccacgaggtgtttgactgttacaatggcactcttagtgaaggagttcccaccctaaatatataaataaacaacaaaatgtttaaataatcaaatgtatttccaaaatggcacagggaaacaaatctggggtgactgcccctattattcatagaaaataaaagtgagggttggggggagatggggatggttaatgggtaccaaaaaaaaaaaaaaaaaacaaaacaaaatagaatgattaagacctagtatgtgatagtacaacggtgactatagtcaataataattcaattatatatttttaaataactaaatgagtacaattggattgtttgtaacacaaaggataaatgcttgaagggatggatatcctgttttccatgatgtgattattacacattgcatgcctgtacgaaagcatcccatgtaccccataaatatatatacctactatgcacccgcaaaaatttaaaggaaaagaaaagggatgtgggtggagtggaagcacagaatgagctgattaactgaaaggtgcttggaaacctgttatgtgctttcacatgtaaggaggaattattactaaaatgctacagacgcatcacccccagaatcctcagaaggggtctcaatagtcatttggatgacatttaaccgtgtctgctgcactgagctcccagagccacagagcacttccacagaaccctgtggttctttcgagttctaaagttgctccccaattccaatgtccctgtttattttatagacttggccttccaaatggaagcacctttatttcaggtggctggggaagtcttctgagaagatcttttataaccaggaagattggatcttaggaagacttgtctgagattctccagagggcctccaggaggggaggaagacaccaaaaccctcttcctcctcagggacttttgtgatgtcaaaggagaaaactggaattctattcacaactctttctctgtggaagagtagatgtgtcatgcccagtgcagctcagattccagcagaaacagaaacaagaacatgcccagaggggctcagcatcagtgaagaagcccagcaaaggaaagcttgcttctcccggtctggctgccttcagaggcacccagcttcaagccagctgggctcagttagaaagaccacatgtgggatattagtttggtttcaaatcccacacttaaagcgggacatttccaaatgcagacagatgagcccacacctccggaacagatcttgaaactgtgtcacatgaggaataattgagggcacctggaaagttaaatttggcttggcacaccccaaagtcttcatgggacacctgatgaatgccttaaaatatttaaagaatggtagaaggtggaatagaccgtattacctggaagagcagaactgtttaaatatttggttaggcagaaggaagactttctgaaatgagagttctttgaaaatacaatgcagccaggagcagtagctcacgcctgtaatcccagcactttgggaggccgagacaggaggatcacttgaggtcaggagtttgagaccagcctggccaatatggtgaaaccccatctctactaaaaatacaaaaattagctggacatggtggcaggcgcctataatcccagctactcaggaggctgaggaaggaggatcacttgaccctgggagacagaggttgcagtgagccaagatcgtacgactgcactccagcctgggcaacagagcaagactctgtctcaaaaaaaaaaaaaaaaaaaaaaaaaggatgcattgccttgagaagtggggagttccttagctggaggtgggaaggctgaggctgcagggaggtagtatacccaagcagcaaaaactgtgggttttggtgtcgggctggacccaggttcaggttccagctctgtttttgtgagactttgaaaaatttcttttgacccccaattacctcacttgtgaaatgggtatgataatatctactcctgtgggttattatgcaaagtaaatgaaatgttaatgaacacaagtgcttggcaggtaagaaatgctaaatttgtcattgttcctgtcactattatctcagcttgataaattggataggaagataaaataatttcctcagatttcctcagatttcttcggccctctaattccacagttactgtgaggtctcatttcatcaaaactcctggtagcatcctcctaattcctggactgcccagagtgttctgtttcagtgtggctccggatcttcctagacagtggcagagatcctcgcctttcctatcgtcactctccttataatcaaaaacaatctttcccatatcccagttccctgaaactctattttctttggtaataactggctattctggtaaatagtggatattaacagtagaaccatattaatatgacaatacagttaccttctcctttaaaatttttatcttttaaggaagcaagggctgaacacagaacttggtcaagaactggcaggcaagaaaaattctaaatgttcataagaacagattttgttttggtttgggttttttttttttttttttttttttttttgagacagagtcttgctttgtcacccaggttggagtgcagtggcgcaatctcggctcactgcaacctccgcctcccaggttcaagcgtttctcctgcctcagcctcccgagcagctgggactacaggcacgcaccaccacacccagctaatttttgtatttttagtagagacagggtttcaccatatgggccaggctggtctcgaactcctgacctcatgatccacccacctcggcctcccaaagtgctgggattacaggtgtgagccaccacacccggccaaagacagatctttactaatgagattctgtagattatgcctagctattctagagagattatgaggtggtcattcaggggtaaggtagaatacaaggcaatctcatgacaggctgacttggtggatagttaggtgctggtgggaccttcctctattctttcattagtgttctgaggaaacttaaagctcactcacaccctgtctttctctcacccaagaaaagagcagacctatgtgcagaagtgctggaaggatgtgcgcgtgggagacttcatccaaatgaaatgcaatgagattgtcccagcagacatactcctccttttttcctctgaccccaatgggatatgccatctggaaactgccagcttggatggagagacaaacctcaagcaaagatgtgtcgtgaagggcttctcacagcaggtagggctctttctaatatcttcaatggtaaagtcatagaaaggatgcaagcctaccctactggaaaattgaactaaacctactgggtagaggggaaagtagtagatgcctccttttccctagcactttagatacactaaatcctaccagcagccctctgagatggatattatctgcatatcacagatgaggaaactgaggcttagtaaagttaaataacttgctgaaggcctcagagtttctaaatggggatccactctgttcaactgaggaaactatactctctgctctgaactgaggagtctaatgtctgttccatcatcactaggaccaactcctcttctgtgctcatccaatcccaactcactctgcccagctcagtcctagcaatctctcctgccacgaatcctaatattccttctgcccctcctaaactgcagcaaggtatcattaactatgtttccatttgtgtattccttaacttctcaacagtgcttaagcctccttgagggcagacagagatcactgatatctttttttttttaagagactgggtctccactgggtgcaatggctcaagcttgtaatcccagcattttggcaggccgagaggcaggtagatcacttgaggccaggagttccagatcatcctggccaacatggtgaaaccctgtctctactaaaaatttaaaaaatagccagccccgtgatggcaggcatctgtagtcccagctactcaggagactgaggcggtagaatcacttgaacccaggaggcagaggttgcagtgagctaagatcacagcctgggcaataaagtgagactccgtctcaaaaaaaaaaaaaaaaaaaaaagagagagactggctctcagtctgtcacccagactggagtgcagtggcattgacacttttgtttaatccccaccctttcataaatggtacctcagacatcatggagaaatcattattgtttggtgggtaaaagctctggctctggggtctgactgagatgggttcaaagcccaggtctcaccactcatcagccatctcaccttgggcaagttaccgtcctctcacaccttggttccctcatctggaaaatggggacaaaaatagttccctttccatagggtagttttgaagactaaatggtaggtacatgacttacttagcatgaagataggcacatagtaaaagaccagggaacagttggtattaatatcaatgctttcataggcaatatgtgttgactgactgaagctgggtgtgatatcccaatttgcaattaaaattctccttgtgggagttgatttccaatatggtccctttctttaaccagggaaaagagtacaattttatcacttttcttcattctgccagcctttggctggggagaaatggaatgagtcagaggatttgggagaaggaaagcaaatgatttattcctcagagattctcatgagctagagtgcagttttccagactcaaacttctcaaaataagtttttaagttctaggagcaagggtcattgtaccttgccttgcctctctctaagcacctgataaacagctctcataaaaccctttttgtgtgattgatttggtcctcagaagcctgttctctcatgcatatcatgggaataataatagctatcccatggttttgctgtgaaattcaaatggtataaggaaagtaaagaacagaataaagagtttgctacccaagagactcacaataaatgggaaccattgctgctactgaggctgcagttgccaccactggaaatggaaaccaccaccactcactgtagatcagcatgtccactggtctccaggctctgagtcaatcactgagcaaggggcctgtctctgagttttctcaccctttgcttattacagccgcatttgctaaatcaccctagtgtttgcaaaaaggcagggtgagatctggtctaagttcacagagtcattctagacaagcaataacagcctgtttctgggctcagaactctgtagcctgcccttcgaccagaggctttcaagtcttttcaacagtaacaatgagaaatgtataaaatattacacatagatacacacacactcacacatgctgacacacatacacgtgtgtatatgcgtgtgaatgagtatgtaagaatgacaccttagcctcaccacatgcaaggcactctgagactttctatgctattctaccttttttttttttttttttttggacagtctcgctctgttacccaagctagagtacggtggcacaatctgcttagtgcaatctatgcctactgggttcaagggtttctcctacctcagcctcccaagtagctggaattacaggcgtgcactaccacacccagctaattttttgtatttttagtagagacagggtttttgccatgttggccaggctggtctcgaactcctgacctgaagtgatccacctgccttggcctcccaaagtgtggggattacaggtgtgagccccggtgcctggcctattctaccgtttttgttttttttaaagttctaggagcagtaaaacttataaatctcccctttagcctccctaccccaacattctgaatgtttcttactctctctggcagtcatttcagtgttgtttcagttcaaccagtgacttctttttgtctttggcagcagttcccaaactatgttttgcatattaattagtcagatagtttgggatttagctggaatgaagagtcaggtaaaagggtcattcacactccggtgctatagaccagcctatttaatgagtctctccaaccctaaccctcagttctcacagagcactcgctgagatgatttacaaaaagaaaaacaaaaaagagagagaggtaaattcctatgtgaaaggaagattatttgagcttgaagctttccagggttctctactctgtctcagttcttgattctccccctcactttgctcaagagtgtttttttcattttagtaataataatagacttttattgattccatactaagggctttgcatgattatctcgtctatcctcaaaacaacccaatgagatgggcactattattgtctccattttatacaaaacgaaactggggcatacagaggtcctgtaacttgcccaaggtcactgagccgggaagtgttgaagcaggattcaaagccaggtttgtccagagcctcagttttttgttttgttttgttttgttttttgtttttgttttgagacagagtcttgctctgtcgcccaagctggagtgcagtggcacgatctctgctcactgcaagctccgcctcccgggttcacgccattctcctgcctcagcctcccgagtagctgggactacaggtgccggccaccacgcccggctaattttttgtatttttagtagagacgaggtttcaccgtgttagccaggatggtctcgatttcctgacctcatgatccgcctgcctcagcctcccaaaatgctggaattacaggcgtgagccactgtgcccggtcccagagcctcagtttttaaggctcagtacttcatctccctggccctttaactgttaccttgcgttcacacagagatgcttacttgaaagcacacatttattgttgccaggattctttccacatagagatagagggtggcagggataatgaaagtgggctcagcctgctccctggagggagacatcttggctgctctttgcgaccttgcttctcccttatacttttagggcagaaagatttctgagtatggatagaactcgcttctggctaactcggtaccataggatttccctaacgtattgaacaaacatgttgatgagagttgcaagaaaaataaatgttgcaaggccaagtaatatgagaagacaatagattacaagctttcaaatatgtgttctgcagaatttctctgatactttaataagccccaaggagaaggacaggtgctattatgtagtatttctaaatatttaagcacaagaaacttttatcccaagaaacacatctcagaactactgtaggaggggtgggctaccactaagggatttgctgcaagtatattacaggtgttgaaggtgtatcataatcatcacacgggaagtttttaacaatatatatgcatccttctgtatcaccaccagtaaattatgactcactaggactgagtagggacttgagtgtgcatatttttaaaaattttctcccagacaatctcgatataaacctaccaccacctccttgaaaacctgtacaaccaaggagaggcgccatctccagtgcttccagaaacacttatcctaataatggggagaaaactaccatctaggtactttttactatatactagttcttttacatgcattgtctattttaagcctaagatcaccatgggaggtgggcattactatccctattttacacatgaaacctctgaggcactgaaagagcaaatctcactaatcatctcagagattttgaacacctacaaatatggtttgtttggaaatttaatatcttacataataagtattaatggctcttgatagtttattctccctctaagtccctactgtctttgagaccttcaccttgccaaaagggtttttactaaccacagagattactaggaacatctaaccccacatatatacccacactcatttttaccatcttctggatgatgagaattactatattcgggtaattcaaagtcagtaagacatactttgtcccagctcacatagatctgcatttctcacagtctgctaagcacttgtcccaagagacagttcttgaaaaactcatggtccgtggtcaagtcagattacagtttacaagtcaaattaagaagcttttgtcctgtgaacccctcttgcaggttccaatgttcattaacatattaacgtctctgagaaagcctggagtcaataggcctgttaaactttctttagccctgagctctccaaatttatttaacctaagaattatttttcagcacaaatattattaacattcctatggaccttttcagaaaatattagcctgaattgtggtacagacatggtcacaacaggtgaagggtaacaaagaagttgacaatcctcatggcttaagcagttcattcttccttttcctgtttaggttcaaatgaaattataaacattaaagaacttcttaaaagggtctttctcccatgacattgcagattatcctcaaggctgccaaagagttagtttcaaatcctttcctcagaattcttcttggactaaatctactttttttttcattggaacttttatcccaatgggccatctttgaatttataaaattattgacctatttttgagagattcactctcacttcccattgttaaaaaaagaggggaaagggaaggaattaggatttgctaaaaacctgtccagctggcaagaggactttattagagaattcaaacgtacagttttctctttggtgacattctgatacctgaaacctcttctgtaaaagagttttaacctaggaatttaacacctggaaaggagtatatagcattcattttgataaatgtaacagttatctaagccaaagaatcagaaatgaatgcttccagttagtgtttcagatcaaacatgtccctggctatctattttccaaatcactgaagcctaagtcccactgaagcatgggtcagatcattccccagggccaagtgggaacttgctatgccaagtatgatctgcggactagccacttcagtaagcatcactgagagcttgtcagaaatgcagaatctcaggccccatcccagactgaaccagaatctgcattttaacaggatcctcaggtgattcatgtgtacatgaaagtttgaaagacactggcctagagcatcaataatcaacgtaataatcatatgtatctgtttgttgctcaggttaaaaattctccattgagtctcccttttgactagcttgcatgccaccaatggttagtgcttttaagccatttgctcaattacgaatagctgctatagcttggatcctctgcagtgaaagtatgtattgattttaaggtacttagaggagcattttgccaacaaagagttgagatccaatagggagaaatttattaccttcccagttcagtgatgtcaaacctcagttaaagcaaaaggtagcaacctatcttctaaccttgcctgctcttgagaaccagagaaagttcctctttcctgctagatttgcactgggacctgtccctgacaggcttctccaaatttcatttaagaatgaaacttagtgctttctacctgttgatcagtgcttaaatgttgagcacagatcacattttctaggattcttttaaaatatgacttcataatagtataaaatatcaagaagagattacaacagataactggattaaacacctatgtgccataggcagtttttctaagtgttctatatctattatttctttctactactcaaaaaaaccctgtaaaataggtgcttttattatctatttaacaaatgaggcaagaacagttaagaaaccctgttctctaggttaactgagctcagattcaaactcgggcatagttctttggtttgtttgtttgctttttgtaatggaaatttttttttattatactttaagttttaggatacatgtgcacaacgtgcaggtttgttacatatgtatacatgtgccatgttggtgtgctgcacccattaactcgtcatttagcattaggtatatctcctaatgctatccctccccgctctccccaccccacaacaggccccagtgtgtgatgttccccttcctgtgtccatgtgttctcaatgttcaattcccatctatgagtgagaacatgcggtgtttggttttttgtccttgcgatagtttgctgagaatgatggtttgcagcttcatccatgtccctacaaatgacatgaactcatcattttttatggctgcatagtattccatggtgtatatgtgccacattttcttaatccagtctatcattgttgggcatttgggttggttccaagtctttgctattgtgaatagtgctgtaataaacatacatgtgcatgtgtctttatagcagcatgatttataatcctttgggtatatttccagtaaggggatggctgggtcaaatggtatttctagttctagatccctgaggaattgccacactgacttccacaatggttgaactagtttacagtcccaccaacagtgtaaaagtgttcctatttctccacatcctctccagcacctgttgtttcctgactttttaatgattgccattctaactggtgtgagatggtatctcattgtggttttgatttgcatttctctgatggccactgatgatgagcattttttcatgtgtcttttggctgcatcaatgtcttcttttgagaagtgtctgttcatatccttcgctcacttgttgatggggttgtttcttgtaaatttgtttgagttcattgtagattctggatactagccctttgtcagatgggtagattgcaaaaattttctcccattctgtaggttgcctgttcactctgatggtagcttcttttgctgtgcagaagctctttagtttaattagatcccatttgtcaattttggcttttgttgccattgcttttggtgtttcagacatgaagtccttgcccatgcctatgtcctgaatggtaatgcctaggttttcttctagggtttttatggttttagatctaacatttaagtctttaatccatcttgaattaatttttgtataaggtgtaaggaagggatccagtttcagctttctacatatggctagccagttttcccagcaccatttattaaaaagggaatcctttccccattgcttgtttttctcaggtttgtcaaagatcagatagttgtagatatgtggcattatttctgagggctctgttctgttccattggtctatatctctgttttggtaccagtaccgtgctgttttggttactgtagccttgtagtatagtttgaagtcaggtagcatgatgcctccagctttgttcttttggcttaggattgacttggcaatgcgggctcttttttggttccatatgaacttgaaagtagttttttccaattctgtgaagaaagtcattggtagcttgatggggatggcattgaatctataaattaccttgggcagtatggccattttcatgatattgattcttcctacccatgagcatggaatgttcttccatttgtttgtatcctcttttatttcattgagcagtggtttgtagttctccttgaaaagttccttcacatcccttgtaagttggattcctagctattttattcctttttgaagcaattgtgaatggaagttcactcatgatttgactgtttgtctgttattggtgtataagaatgcttgtgatttttgtacattgattttgtatcctgagactttgctgaagttgcctgtcagcttaaggagattttgagctgagacgatggggctttctagatatacaatcatgtcacctgcaaacagggacaatttgacttcctcttttcctaattgtatgccctttatttccttctcctgcctgattgccctggccagaacttccaaaactatgttgaataagagtggtgagagagggcatccctgtcttgtgctagttttcaaagggaatgcttccagtttttgcccattcagtatgatattggctgtgggtttgtcatagatagctcttattattagtatatacaaaactggagagaataatatgatacatttctatggacccatcacttaatttcaacaatcagtttataaccagtcttattttatctgtctccccaccctctactctctgcaaattattttgaagcagatcttcaatatttcatttcactgtaaatattttactatctctgaaggataggatttttaaaatatatgattatattatcatacctaaaaattagcaacaattctttgatatcagctttcaaatcagttttcaatattttccatttgtttgaatcagcatccaaataagaacaagtattgagataatttctttaatctcttttattctgtaagtgccccatttagctctctttttaatgcatagtttttgttgcttaataaaccaggttgtttgtcctgtatgatttctcttgttgttgtagttgttgttttgttttgtgttttttttttgagacagagtttcactcttgttgcccaggctggagtgcaatggcgcgatctcagctcaccacaacttctgcctcctaggttcaagcgattcccttgcctcagcctccagagtagctgggattacaggcatgtgccaccatgcccagctaattttgtatttttagtagagatggggtttctccatgttggtcaggctggtcttaaactcccaacctcagttgatccgcccacctcagcctcccaaactgttgggattacaggcgtgagccactgcacccagcccctgtacgatttcttatagtctgtgagttgtcttcctgtggaaccatttaacatgtttttctgaccgctatacttttacaacatggtagtaggatctagtgcctaagtcggactggggttagatttggcatttgtgcatgtgcatgtcaatgttatgtcataggaactgcagtgtgctaccatctcaaggcacaaacatctatcttttttcactgttaatagtcattgatgatggttgtttagatctatgacttcaatggaatttgaaaaactagtgatattctaattggtttataaggaaaaatttcccttcgtgaagtattgggtcactcctaagtgtcctctgtagagaaaacggatgtttttgagtctttcctctcatttacattttcaaaataatgagttggttgcctaggatcctccaaaggtgttcagtgggtttttcttttttagcatcaatatgaactcatggttttaaaaatatctgacatatgtcaaatcaatgcatttattgtctttcattattgccccatctctagccagtgggagcttcttaaaaatgagaagtggctcctgagtccttttcacataacgttagtggtctttggtagatctggttccttttaatagaaaccacaataagtacatgctagaggagtttattactattgggttgattattatttctatgccatttaaatgaacagaactaggacacttttaagattaaatacatctagattcatgctgacccttcaaattcaagaatagaggttttttagtccacctcatccacattaaatacgtaatctttttcccacatcaggcaaattccttatccactgcattacaccacccccttttgatatttaacactcacagaaattctatgaggttgaaattttaggaactagcaacatattagagatgagaaaataacttcagagagatcaaatttgtcaaagattatccaggtaatatagtgttgagaccaaattagaactcagttctgacgtacctgattatttatcccattgcgggaaatattcttaactttctttagatgtagttttatttctcaaatgaatataattttcatatgtatgaaaattctaaagctctataaatgttaggtttaattatttataataatgataacttgatggtgatggggcaaccctatgaaaaactgttacttttattttctatagacttctggcctccttgtggtgatctcctccagtcttctacttgcatgtgggtacacactctcctcacacacccacacaatgtcccctcttcccaatgtctagcattattttcacatttctattgaaaggtcttttcctttagagccttacgaggaaactctgctaggtttgtgaaagatgaaattttgtttgtttgtttttgtttttgtttttgtttttgtttttatttgagacggagccttgcactgttgcctgggctggagtgcaatggcgcgatctcagctcactgcaacctctgcctcctgggttcaaaagattctcctgcctcagtctcccaggtagctgggattacaggtgcccactaccatacccggctaattttttgtatttttagtagagacggagtttcactatgttggccaggctggtctcaaactcctgacctcgtgatccaccctcctcagcctcccaaactgctgggattacaggcgtgagccactgcgcccggcctgaaaggtgaaatattaatggataatatcttaaagttatggatgatagcctaaggtattaatgaattatatcttaaagttttctccttcccaccacctccagtacccaagacaacgtatttacattttagtattggccttcactgtcttaaccaattgtaggtatttaaggtcaatgtgggaaatatttgatatctcaaatgaaaaccataccaatctaatatggtatacggattagttaagactcttggttacatgtgacagaactgtaattcaaaatagtgtggacaaaaaattaaatttattagaaaaatatggggtgggttggacctcaggttcatgtggaatgagggcttcagaatccatcagtatgatgtccatctcttgtctatgtttcttgtgatatgtttggtatgaatctttcaaaccaacttccttcatgtggaatgaaacgtggtaccagtagtatttgtgctttatagcttaacccccagagagggtctagcaaccttccctgatgtctagattgaaaagcatcctggggaaacgtactgcctggcctggctggtacaatgtacccattcctagacaaattaactctggccagaaacaaaggactctgtgattggcatcctccacttgaacctcatgtttgaaattggtctgtggggtgtgagagttctgaacagcacagcaataaatatccattatatctatgactcatcagaaatatataaacctaacttatgtgtgaccatggtcgttcatccttaaggaagggggcttaataccctctgtctctctcctatagtccctagtgttattcctcttcccaaaaagcccttcccttctgacctctctctgcctaggcaacactctgaccggtgtcccacaggtaatcactccttcctctgtgctcccatggactttgctcttgccactctcaactattatagtccgttcaataaattcatttactcaaccaccatctgatgaggtcctcctgttgccagacactgtactaggatctttgttttgtggtttatcagcagaggtgacacattgtgatcatatctctcatgaacaacttaatatagtttcttgaactgaaactcatgctttcttctttgtgaatttttttgccaaaacatgaggtacaaagtgttggatctcatatcatcttcttgtgtttcagttatccacagcaagaaagaatttgtacagaaaagtttgtctgtgtaatactcccttaaggtgccactggccatctgatggcacctgcccatatttcaggcatcagaccactcacacattcattcatcaagtatttattaaaagccttctatctgccggatgctgtagcatgctctggggacccagaagtaaacaagagagatacagggtgcgactgcatgcccttacagggaattacacagacaattgttaacaattttgccaacaattagttccttttagaaatgacagaagaaatcatcctatttccagtatttgcttggcatgccaagcccatgccctgtatgttcaggaaatgccatagcaagatctcaagattacttttagtcagcccaactgggaaacagaatatttgtccacttgacaaaagggaactcaaactgtaaaaaatccttaagatagtctccctcagagccctccagcccaatctgcctgcttttgtgggagaatcactagggcaggcagggacctctagagtgattgaatatgcaaatgatttcctcatccagagccagaggaaagtaactgccagtcactctgttgtgggttatcttgaaaagaaccttcacctaccaggaagcagaaaggttatcaaatgctggtaactgtcattagttttcagataggattctcagaaatcagagggttgcttaatttgtataccaggaagaaaacctcaatcacctagctcagcagctggggcgtgaagaacatttgctttcaccatttagacaactgataacttaaaatgaaaaaaaaaactttagtgttcttccaaggttgcaacatacctcctgtgtagcttccttggttggcatggtttgcctaccctgtaacccctattccttggcacagtcagctgagcagtccacacaggacggtcagtgccgccattttgctatccttatccccaggttgtggtggctctccttggtattcctttagcctgggaatcatgtagaaacagacaccaagagtttcacagaagcatggcagtcactaatccaactcgtctttttggtaaacattcttgactcttggtaaaaactaaatacataaatgatttctatgtttgaggaaagagttttgttggtttccctttcttcaatcgacagaatctttcgtgaatgatatttcctaatggacacggagggatttcaaagtggtctaagatgttcttctaaccctgtaagaactttatgcctatgggttccatttaaaaaaaaaagaccctttgtgactataaaaaaaagaggttgtcctttcaatgtccattatttaagaatatatattaaaaccaaaagctacagtgaatctagtgaagtggtaaatgaaattttaatttattaatctcaataattcctttggaaatctgaaagatagtggtacatgcatgtgtgagacttatttttactctgtctatagacagcatttgggagcatacaggggatttgtagacaagatgcagtagcttaatctaccaatcaggaaccactagcttacagaaacagcttggtagcaggaattacttaacagtctccttctttcttttcctcccttgagtcattccactcaagtcaaagccccacagtgggagtgtttaatgggcagggcatcacgacttaaattcccatcacaattataaaccagaaaggaaaggcagtttcccacaagaaagccagaagtttacagaaaaaggatgaaacagaagatgggtagccagaaaacagctatccattacaaacaatttcaaaagatcattcatatatttatttaatcatgtgtattgatcaattcgatcattaattgtaaagacttaaaggaaataagcctagaaaagtaaaacttgaggcaagcgcaagggaaatggcctattctagctaatggaatatattccagcctgagatggcaggcttgctgtacctgggacacaggtgagtgaggaggacctcaaccccggggagtgattacgccctggcaccaggcccactttccttcgctctcaaagataccgctattgacacatctgagccggactgggaactttgagttgtcttatggctgcaatcactgatttgtgttaatcacccctttcttcccttgattctcacttactgtcccacatgactcctctatcatagatagtaaataaaagcttgaatgcacgcatgaatgaacggaagactagactggcccaatgtgggatctaggactgtgactacattttttatttgttgagccaaagaagtcccataaaagaaggggtcttactcccatcaatcaaagttaagactgtacctggggctttttctacggcatgagtcagcctttacagtgaggtctgctttgcatctcctcacccatcacctttcaaaatacacacttctaatatcaccctctccattactaaccttacctcaacacatctttatggtgtgcctgcaaaaacaaggttattacaggagatgccccagaggaagatgacagtctaccagaggatgcacagatctaggcagagatgttcaatggaaacagcagcagtggtggcagcacatgaaaaggagcaattctgattggcgggggtggaaccttctatggggattagagtgagcttcatagagggagtggccaaaaaaaaaaaatttaaatgcttaaaaataaaaattatcaaaaaaatgtcttctaggccaattaatgccttaactttaacccttaccctttgtaggtactttaagatgcaaatgtgcttggaagaggtaacacattgcactgcttattcattataatttttgtatattttctactataaattagagaatgtattcattcattaagtccttcagaggaattgagtaatgaacatagaaaagaaatagggccaagaggagagcttataaatactcatctttcctctgtgcatccaaataacactgtggttaaggagcagactcttagggagtgagcgatgctaaggttaaagcctgttgtccggctttgctgtctggatggcactgggaaaatcacagattttccctaagcctcaattcctttatctctgaaatcgggataataatggtacctacctgatagaattattgtcagaatcaaagaagatggcatgtataaaatacttagttgattcttagtacacaacaagcattcaataagtgctgcagaataataataacaggagaggaggaataaaaggtgatgatgatgatgatgacgatgacgacaatgactttggaatctgacgatgtgaatggcaatcctgactctgttacttaccaaccatgagacactttagtctccatctgcatgtctgtccaaacctcttaaggtttttgtgagaactttatgacaggtgtctggcacatagtaagtgctccagataggtaggtctgacctaaagagctgcagagacacacactcttctctggaaaggattggtcttttcctgtgtcttaatggctccctaggccttttgctggaaagcaagactttcatcaaagggcagtgccttagataaaaggctgggtcaagaagaagtgtccagttaggcgagctgcttccataatctaagaaaaactacagggtagtgagaggacattacaccgtctcacaagggaatcagaaactcctgaacaaggttaaaataagaaccctggccaggcacgatggcttacacctgtaatcccagcactgtgggaggttgaggcaggaggctcgcttaagctcaggagtttgagaccatcctaggcaacagagtaagacccccatctctataacatatacatacacacacacacacgtatttatatatgtatatacgtatatacaacatatatttatatgtatatacgtatatacaacatatatttatatatgtatatacgtatatacaacatatatttatatatgtatatacgtatatacaacatatatttatatatgtatatacgtatatacaacatatatttatatatgtatatacgtatatacaacatatttatatatgtatatacgtatatactacatatatttatatatgtatatacgtatattaatatatatttatatatgtatatataatatatatgtatatacgtctatataatatatatgtatatacgtctatataatatatatgtatatatgtatatattatatatatttatgtatatgtaatatatgtatatataatatatatgtatatatgtatatattgtatatgtatatatgtatatatgtatatataatatatatgtatatatgtatatataatatatatgtatatatgtatatataatatatatgtatatatgtatatatgtatatatgtatatatgtatatatgtatatgtaatatatatgtatatatgtatgtatgtatatgtaatatatgtatatatactacctatgtatatatgtacatatgtatatatactacctatgtatgtatgtacatatgtatatatactacctatgtatgtatgtacatatgtatatatactacctatgtatgtatgtacgtatgtatatatactacctatgtatgtatgtacgtatgtatatatactacctatgtatgtatgtacgtatgtatatatactacctatgtatgtatgtacgtatgtatatatactacctatgtatgtatgtacgtatgtatatatactacgtatgtatatatactacatatttgtatgtatatatgatatatagtatataatatattgtatatataatatattgtatatataatatatattatgtatttataatatatatttatgtatacataatatatacatgtatatgttatatatacacgtgtatatataatatatacactatatatacataaatatatacataattatatacataaatataaatatataaatatataatataaatatatataatatataaatataaatatgtatgtatatattatatatacatgtatatataatatattatatatacatgtatatataatatattatatatacatgtatatataatatattatataattatatatatattatatatattatatataatttataatctttttataatatatattatatataattaatatataatatattatataatatattatatatttttatatatatttatatttatgtatataatatgtacatgtatagtacataaatatatgtatatattatatataaattatatatgtatatattatttatacatatgtatttatatatgtatatataatatatacatatataattttattttataaaatataaaattcgtcaggtctggtggtgcacgcctgtagtcccagctactcaggaggctgaggtgggaagattgtttgaacccgggaagtcgaggctacagtgagctgtgatcgcaccactgcactgcagcctgggtgacagagtgagaccctgtctcgaataaataaataaataaataaataaataaataaataaataaataagaaccctgacaggtttgtaaggctcagcagttctctgtgtcttgagctggcccagcagctgccctggagggaaatacagcaaattcttaaaagcaagcagggcctcagtggttgtctttgcagccagcaggacccatatgcccctctccacagcccctcttcctccaactgaagaagagagcccaggggacaagtagctagaaagagcagggtcaccttttcatgaaaagaggaagatggggacaaaagtcctgtgctcagcaggaaaggagacacagcaggaggaagggacatttcaggagggaggtggctaggaagccccaacagaggaacaagagtcaaacttcaccattgctggggcccggcaggtgtgattaaacaggcagcagggactccgaggcattacagaaggatcattagtgctcagaccccactgccagtcatatctgaaatgagtttggatttagagacccaccactgagctgagtggtgtggatcaggagtgaagcacatgacttaatcaggggcatgaaagcagctgacaaattacagcatgatttgtcatcatcttggagctcagcaagtgtttgtccctgaaagaatcaatacctggagggaaaagggccatatttttagaaactcctggatgggtaatttatttcaagtgagtagagagtttatttatgttggcaccccctcaaatccaatggacagtatatttacacgaagccagaaaatgctatcatttcttttaatcaatttacccctttgaacagctgtaccttgaagctttcagtgataaactcacgccctttgctaaaagctctacccaggaaaccatctccaatcccacctttaccactgctgccttctgtttgggtggaatgttacatgtttcaacactttaacacatagattctgttttttgaggcacaattaagatgggcagggcaggtgatgttagccccattctacagatgaagaaacgaaggctcatgagttgaacgtaggattagtcaatgtagaggagagtcagaaagcaagatctccccacctcaagttgtgtttcatccccattggactaaaagagtttgtacaacagaaatgcctttaaaaaaaatacttagctacaagactgttcaccaggaagcaatgtgctgagtaagtaaggagtagagggtctgcaggtgaacttgaattaaaatcccagcccatgagatttaaataggtttgaccatggggagccttctttacctttcagtcacagatttcccatctctaaagaaaggcaaattaaagctcctacttcatagaatgacggtaagcttgaaaataaataataaagttcttattacagtgtctggcagaaataagtgtccagtaaatgctatttattttgctctattagctactattttcacagcatttttataacagcaaaacaaattgaaacactatacctattaaatggtgaaacgattaaaggaaatatggtcaattttgctcctggaccaaactgagggttgggctgctatttctcgtggcccaataacaagatgcagatgaattggggaggaagagagtttttatttctctaaccagttacagggagaaggcctggaagttattgccagaccaactcaaagttacaaagttttccagagtttatataccttctaagctatatgcctacgtgtaagtgtgcattcatctgaagacataagtgattaacttcttttaatctataactaaggtctgggtcctgaagacctacttctggagcctcagtaagtttaattaatctaaatgagtctaggtgctgaggtgattactttatcttgtctcctgacaaatcataaggatttggggagttcctttagacaccattaaacttgtttgtggaggcctggggagtttcttcagaccaccaattaaacttatttcatcctgaaaagggtcctgataagaattccttcattatcctctcatgcttcaagtcccaggaaaagcctaggcaaccttggtgggatctttgttacattccagccattgtataaggacactggctcaatcagcttttaatgtttaatctagctactcagtgctgggacagttgtaatgaacactgaatctcgttgttaaaatgtgtaaatacacatgtatatacctacacaaatatatgtgggtgtggagatatatatatgtgtgtatatgtacatatgtgtgtatgtgtgtgtgtacatgtatatatatatgtatgtatatatatgtatatatatgtatgtgtgtgtgtgtgtatatatatatatataaaatttttttttttgagacagagtcttgctctgccaggctagagtgcagtggcgcgatcttggctcactgcaacctccacctcccaggttcaagtgattttcgtgcctcagcctcccgagtagctgagattagaggcacacaccaccatgcctggctaatttttgtatttttagtagagacggggtttcaccaggctggtctcgatctcctgacctcaggtgatctgcctgcctcagcctcccaaagtgctgggattacaggtgtgagccaccatgcctggctaatggatatatatatttaaaaccctggaaatattacatgcgcaagcattttagctgtggatatctctatgtggtgtgatttataatgccttctttttaattatctatttctgtggtatcgaatgtgataaccactagccacatgtagctatttaagcttaattaaaatcaaattaaattttttaagaaaacaattccttagtcaaactaccacacttcaaatgctaaatagacacatgtgattagtggcttccatactgcacaatgcagactcagaacattccatcattgcagtaagttctattagatctgggctacagccccacacccaggcaggtcagagaaatgcaatcagggtaatcacctccctctgccctgcatcaaacttttcactggcatttgctttctcttccttaatgaggacttaacttttttttctgacacattacaactatcaaagtgtgacaaagcatggattaccttatttgcaatggttctaacagtgattagctctcccagtgatcctattaaaactagatccctctgaattaataaactcacagagtcctctctctcacaggaggtacagttcgaaccagagcttttccacaataccatcgtgtgtgagaaacccaacaaccacctcaacaaatttaagggttatatgtaagtatctcatgtcccatgctgctagtaaatatctccgctgcagctagaaaatatattgtctagaaatgaccaaacaaataagcatcttcatcctgaggaattttatttgtgtgtgtgtgataaagagggactagagaaatttaaattgggaaactttttctatttttttttttttgctgagtgatagttatttatgttgcagggttaaattcaccaatgttgttaaaaaaaaaaaaaaaaaccttagtaaaatagcatcaaaatcaagattgtgctctgattcaggaaggtgaatatgatttaattaagatcaattttttaagtgcctatattgcattgtaggtaagaacagggactttggaattggacagatctgggtttgaatcggggttctgcaaattacaagctgtatgaccttgggtaaattaattcacctctctgagcctgtttccacatccataaaataaaattataatatctatatcaaagggtttttcttttctaagattgtcagcatacacaaagcccttagcacagcaactggcagagaggaaatattcaattaacagtggctcctgctattaggataattgttattcttattcctcaactttggttcagcctaagcattttactgcaattctgctcccttatcagaccactagtcttcccacaaaataagagccatagtaacagatgtgagtaaatgcccttatacgatgcttttctacaggggtgtccaaacttctggcttccctgggccacattggaagaattgtcttgggccacacataaaatacactaaccctaacaatagctgatgagctaagtagtaataataataataatctcataatgttttaagaaagtttatgaatttgtgttgggccatgttcaaagccaccctgggccacatgtgggccatgggttggacaagcttgctataacagttttcagaggacttctagagaacattgtcatgtgtaatcttcacaacaaccccagaaagcgaatatcgtgatgtggattatgatgatctgagactttatagatgcaaagattctccctaactcacagcaggaacaagacaaagccaggacttatatgggggtcttttgactccaaccccagtgtgctttccatagccgtacattgcggagctcagccatgttacaccaatttctccaccaatagggcctgcagctccctgaaatgcagttgtctttgctttcttccacccacatgtcctcaggccatgagggatataatgaggagaaatagaaaggagaaacaataagaagaataccagagaaaccatagcttttataggcaaattacttttaaaatacacagagcgagcagaaggagacaagcagagaagggcctgaggtcctggggaaaaggcctttgctgcaaaggaggtaaagcctgtcacctgctctgaagagaagggcgccccttgtgccttaggtttgtgaacttgattcatcccaaatccctcacgccttgagtcactctccatatcctcttagagaacagcctcattgttagatttctgtttaggaccctttctccccagaacagctcaggctaacagccagcctttctcagctttcaacctgctccagcctgcccctctcagacggatttcaggacagaactctcccagcttcactcagcccccagcacctcctcttcctagttgctgctctgggagacctgtccttcctccacatgactgggcctcatggatgagtcctaaaagtccagttggactgcggagtagctaacccatggaatgaaggagaattccttgctgtgctcctacatccttgctgtactcagcaagaacaccctcaggcctggcacccacagatggtctccaccttcttcctgagcagacccactggtctgatgcctctgggtttcccagaagcttctgtgggttccgttaatttagaagctccctgaggctgcacaggctggctagaagatcaacagctttcaatgatctgtttgaaagttagggtgtccaatttgaaaatgcgacttttgaatgaaagaatctctacagagcagtggttctcaaccagggacaatcaccaccaacaacaaaaccacccctccaaccaggagacatttgacaatgtctagaatcatttttcttgccacaactggggaggggtgctgttggcatccactgggtaggggccagggatgctacaatgcacaggacagccccccaccccagcagagaattgtgtagtccaaaatgttcataacaccaaggttgagaaatgctggcctataaaaagtataatagaccatccttgtaaaccaagagcgctaaatagacaacagctataagatagcaaatccttttctaccattctttgaaaaggaacattacaaccgagagaagtagaagcctctctcatatgctatcacttcagaacatcctaaaattattcttgaaaccacaagctactgacagtgagacaagcaaggttcattagcccagtattaaatccacagccagcctcctccttaataaacagaaggagcaatggtgggtcctgaacctcagacattcttagaccacctttatgatttttatcatattcagtaaaatctattttatctaccagatttttaattaccttactttttccaaaatttatttgaaaaggaaaatttatatcactgggccctatgggaaaccaggatcacttactatacttaagaggtaaaaattaatacaatgaaatcaaaacagttatattctaactattatttgccatagcatcctttgctttaaaaagtaggatagacaaacattagaatagggtcaagaacatactagcaagaaatgaaacatcctccttgacatattcagcagaagtgaaaatagaaatgactctgatttagtgtgggtgagtggggtagtactttaggtaccctaaggtagtgaaaatctcagtagggtgggtgtctgtgacctagattccctggtcttaggatgtctcatgtactagttgtatagccttggaaaaatctcagccactctgagcttctactttttcataaataaaaataatcatcctactaacttcccagaccacaaagagtcaaacaaaatcatgtaagtaaatgtagtttataaacacagtgaggaatcattagcattaaaaggcatattgagtggcagtatagcactctggggccagactagttttgaatccccattctgccacttcctggctttatgaacttgcctcagtttccctatctgtaaagtgggtatgataataagccctgtcttataaggttgtcatgaggcttcagtgaaaaaggcttataactggacttagcgataagaagtattgaagaacaacacgtttaaaaaagagctctaagagttcggattattatttttttgttctcccaaataggtttggaaagttatatttaagcttgctgaaaatctcaaaggaacggcatcaggatagagtaaaggccagaccccaggtcataactagagttgattggactcagaagtttctagtgtgaggtggaaaactgcaatgctccctggactagaagaaagaagaaactatctctacttttaggatctgcctcccaataatttgggcaaagggccactcctgtgaggtctattttatgagctgttgagcaggtgaaagctggtacaggaaagaggccgagtgagtgatgtggctcggaacgagaggaacccatgacctgcccttccttactttaccattcttacctgtcccctgtcccctgtatgaaaagcaagactacctggaggctccccttggaagttcaccttctgcagttcaggtccccagaagctgaatgacaatgagcatgtgaacactgccagtccttgtaaggccagaagccagttcccttgcacttttgtttgcttatttgttttttaaagtgacaggaagtttattaagaaagggataaaagaagggtaactccatagcagaacagccccttgcccttttttttttttttttttaagatggagtcttgccccgtagcccaggctggagtgcaaaggagcaatcttggctcacggcaacctccgcctcccgggttcaagcgattctcctgcctcagcctcccaagtagctgggattacaggcacctgccaccatgcctgactaattttttgtatttttagtagagacggggtttcaccatgttggccaggctggtctcgaactcctgacctcatgatccacctgcctcggcctcccaaagtgctgagattacaggcttgagccactgcacccggccctactggttgcccatttttatgggtgtttcttgattatatgctaaacaaagggtggattattcatgagtttcctgggacaggcatggataattcccagagctgaaggtttctcccctttttaaaccatatagggtaacttcctgacgttgccatggcatctgtaaactgtcatggctctggtgggagtgtaacagtgaggacaaccagaggtcactctcatcaccatcttggttttggtgggttttggctgacttctttgctgcaacctgcataaaaacattttgaatatgagaattgaagccaaggctttttcaccagagttctgccttttatgttggtaaatgggacaattttctcagggtggacaattcccttctaatggtctagctcccacccaggcctcctaggagcaaaaaagagatctacccttgaacatgaaggagattagattctcagctaccatcactcttctgaaaaaacagggaggagagggatcatgttcactcaccacttctagttctgtgacagtacccagtgacagcaaggaaaggccaccaaaccaccccctgtcttttattcatcatccccagggagcatcctgaccagaccaggactggctttggctgtgagagtcttctgcttcgaggctgcaccatcagaaacaccgagatggctgttggcattgtcatctatgcaggtcattgtctgggtagtttcttttgtctgaattttcctttatccttccccctccaaatccatcttcagtcaatgggaaccaacaactgttcacagtaacttcccatttactcatgtaacttcccatttctcaactaagcaaacggaggctgggaatcacagcagttcactcactctacaggagacatgatgagattccaagttaatatcacccatctgcactagatagggaaagggattcacactcaatcatcccggtggttttgtgctactaactaaagccagaatgaagtgtatcttcttaagcctgtggaataacctcaccaaacttaacaacttcccctttggagcctcaatttcctcatttgtacagtggggagaatatttgtatctgcctcatagagtgtttgtaaggatcaaattactcagcacatgaaaagcatccagcactgcctatagcaaagagagggctcagtgggttttagttgtttttgcagttatgtttttactattacctttatttattttatggctccatatatggaggcctatctctccttcccactttgatcctgctttccaatgaaaaaagataatagcagcgcttctcacaatggaatctaaagtcttggagggcaatcttggagctgctgtatctctagtacttaacaccagtgctcgtaggtacgcaacgcacctgttgttacatgaacacctgaagacttcagccacaacagaggaaacatggtctctctggagcatctacctttgctggaaaactccagaatgtgttttcttctgagtcttccactcactgggacactttggaatagtttgcttattgcttttttgtttggtttggtctccatagaaccccacttctgatggacatagaaaagcatttaaatatccatctaccataagatttactctttgggattgtcaaagaaaaacaggtctttttaaacataatgtcacgatttagctagctttccctaatttgggagagggggattatatttgtcagttcagatgacttatttcgaagatctttagcaatggagttcaacaccatctggtaaacctattaaaaatgaactctccagcaatctccactgtaccaaaaaagaaaatggtaatcataatcacatagatttagagctttgcttctctgcctgaacagaaataaagaagaaaccttgagtaggtgatgggagtggtatataaggtggcagatatggagtgttaaccatggctccagctagtcgggctgcctatgggtaaaatccattcatattctgcatgttcctgaacaggatggttgaactttcagtgcaagagggactaatagtttctaccttgtagctttataatgttagaatgagattatctgtgaaaagggcctaatacgacagttggaatacatcaggcccgcaaaactatgagaaagaagataccagttgtttttaacattattatctagagctggggttctcacctttggcaccattgacattttggcccatattattctttgtgacgggggctgtcctgtagggtatttagcagcatctctggcctctacccacaagatgcattagcaccccccaccaagtgagataacccaaatttctcaagacgttgccaaatgtcctctggggagtaaaatcactcctggtgagagcaatggtccagaattctcatttcacccttgacattatcaacgggtaaaacagggcctcagagtcaaaggcccaaaaaggccaaggtgagatttacagaagaaagaggtccaatgtagaggtgtgtgctcctcacagcaaacactgagtcccaacttaccagaaactaatttagtactttgtgtgtattgatttattttcccacttcatacaccacaatcatctcccattttttagatgaggaattgaagtacaaagaggatcactcacccaaagtcacatgcctcctgagttgaactctatgcaacccaaggtcaagtatccacagagctgagctccgactctagagcccacactcttatccactgccccatacttcctccccttgaacccaactctttccaaaagaacagaggggtctcagaaggcaaggatcaggtgggtgaaggggatagtcccaggatccctgaatggagtgaggctgagaggcaggcagaaattctacaggcccaggagtactgctggaacccctgctcacaactgcagcaacttgagtctaattttaaaagcctagagtttttttgctcctactgttttgttgctactttaaatccacaagacaaccagctaaacagcataaaagccgtttgcttctggagctgatgtattggttttcttcaattttgcacagaaaatatgcaactgatgtgtttttcatttgactgctgaggagtatggcactgtagttaacattcagcagccccaaaggagaggctctgtctaaagacaaagtctcagtttgactcttagctcttaggtgtgtgatcttgggtcccaggggttggtgaaaggagaactacactggcaatctgaatcttgggttcacaatgtgactctgacattgacttattctttcactttgggcagatcctttttaccctctagccctcagcttcccctactggagaagaaggtgactgggtgagattggtagttttcaaactttgtcatcctttctttaaccaaaattgtatgcaaaacttcaacataggagtggagctgcccagggttagtgctggggtggggacctttggtccctactactcttgctcaggcaacaccaacaacttaggcatgaccaaagaaacaaatagggaaactgctggtcccaggcactgtcctaccacagggcttttgcatatacagttccccagcctaaaactctgctgccaactctgctttcccttcaggcctcccttcaatgtcatctccttggagcagctttccctgagcaggctctccaacaccacctcttttccaccttggccttttgtttactgtatattatttatttcataggacttattaataatgataattatcccttctgtcttcttgtatatcttcaatagaatgtgaaccctatgtcttgccattgtatcccactgctagcccataacaggtggaacagaacctttgtgcaaattaggaaaagacagcccttctttaagacagcttactatcatttgccagaactctgtccataataaacttataaatctttggcaactacagaatgagggctacgctctaaagttgtacagggcatagcctgtgcatgggagctctctcagtgcccaccacagtgtctggcatgcatgaaggggatgctcactgagtgcctgctggtaaattatgtgaggcccctacagctgttctcagcaaccttctgaggcggggcaagttcaggttaaagagtgaagcctctcttttatcttaagctcctgtgagaagagctgagggaatggtgtaagacataggcaaacaggaactaagggactgatttcctcattttctctcaaaggccatgagacgaaagccatgctgaacaacagtggcccccggtacaaacgcagcaagattgagcggcgcatgaatatagacatcttcttctgcattgggatcctcatcctcatgtgccttattggagctgtaggtatgggatgttctggaaagaacaaggacacagtaatcgatttatttgggcaagtttcttcagcttcctcatttataaagtagggctaataaaatgtaaagcctaccctgcccactttaacgggatgccaatgaaatgaaaatgcaagagaaaatctcctaaaagtagtatgtgttctttaactattcagaatatcatctgatatttatttggtcaagaaatatttactgaacacaggcactctcgtagcatggaatgaaaacaagacgaatcagactgtatttgtttcccattgctgctgtaaaacatgaacacacagtcatttagaacaacacaaatttattctgttacagctctggagatcagaagttcaaaatcaatttcagtaggttaaggcaggagtctcaaacccctgggccaagggccagtacctcctgtcagatcagtggtggcattagattctcacaggagtgcaaaacctattgtgaactgcacatgcaagggatctaggttgtgtgcttcttatgagaatcaaatgcttgatgatctgttgctgtctcccattatccctacatgggaccatatagttgcaaaaaaataagctcagggctcccactgattccactatggtaagttgtataattattttattatatattacaatgtaataatagaaataaagtgcactgtaaatataatgcacttgaatcatcctgaaacccctgaaaccatctccccctccccactgactgtggaaaaattgtcttccgcaaaaccagccactgataccaaaaatgttgcagaccactgcgttaaagtcagggcatcggcagttctggttcctcctagaggctctgaaggaaggctctattccttgtctttttccgtttctagtggctgcctatagtccttagtctgtggttccttcctcagtcttcagagtgcaccaccccaatctctgcctacattttcctctcctcatctgcagcagtagctctccctgccttttacaagacacctgtgattacatcattgggcccaccttcataatcgagatactcttcccatctcaagatctatgacctaatcctatctgcaaagccctttggccatataagatagtgtattcatagggccccaaggattaggatatatcctggggagagagggggtattattcaccttaccacagatattatgggagcagcaatgaggaaagtctttcttgaagaggtagctgctaaagctgattctcaagtggagtagacatttgccagaggaggaggatggcagagccaagtgtaggggctggatgtggcaggcagctgtgagcagaaagagagaggccactcttagccccaggaaaatcacaaagcacagaggcaggaaggaaaatggttttgtgcagaggagcagttggctgttggatgtggcaagagtaaggccaagaatggagaccaaagctgagccagtctgtggcccgagctgagtgaggagcaccatgagaggtggagacaggagtgatctggagccctttaagttgatcctcagagtgtagataaagaggggccaagactccccactgtctatggccttattctaaaaatgattctcaggatgctaaaggagatctcagaaagaaccagggacaatcaagagaaaaactcatgtcctgagtccagaaatatgcagacccgaaaccaatgagcagcagtggtgtttgctgtttacttgcattagtcagaaatcgtagccattgctgttgttagaaagatggtgtctgaaaggctgagagcttcataggggctcagagagactttgtgtgccactacagtgatgaagatgggattgagtcttgtgggtggcctggagttcccaggtatgtctaatagcactccacttgaggctggctcacagctgtaaggagagcacctgggggaggggaagcagggaaacaagaaagccattgtccccgctcccaccctctccccagcccatttggccacctgtgtccccaagatgctgcaggaactgttgtttctgcttcaggacaggtttttcagggcatatcagcgtgaaaaagacatttgagatcatctcactgtgtctccagaaaaagaaagttaatgattaaaaggtcacaggacaagataaggcacagggaaaccagaatctgcttggcagattccccaaaacaataaagaaatgaagaaagttcatgaggagggtcagaattctattctgaattaacaactcatacacaggactctgatgatgcctaattaaagcacagccctacagaagatgaaagctctcaaatgagcaccattccacagttcttgaccacatgtttactttgattttgtaaaggtggtgtttcttctttcctcaccagaatactctgccctggccctcctgaccatccaacacgtgctggggctccaggaccccctcaagtcctcctcatccattcagccttctcgggcttttcccatacttgtcttattcccttaaaggccagtggcccttactctgtgccatgtgttttgtccttagtcatctgctttataacagtaccttcacataaatagcttcatgtctgtaagtttcctttcttctgttaggtatgacggcatttggcccaaactcctgggcaaggaagcatctttaggcattgcaacatcctctatgccttttattctctatacttcttggagctgagagcattttaaacattagattattctattttcacaataactctatagagaaggtattattactatttaacagacaagaacactgagatttagtgagctctataacaggtgctggatgcacttcaccttacataatcctcagataatgcgtgttgttatctcctttgcagataaggaaacagagttcagtctgtacctggtgctgttgctatgggctgtcacagcattctaggctctgctattgcacctctcatactgtatgtgatttgtccttttatgcctggctccctaatttggaagcaaactccacaatgacaagaattagtactaacttcttgaattaatcaatgtcagacagagggagggatgaatgggtaaacatagatggatggatggatgaatggatggatggataaatggatggatgggtaagtaggtgggtaggagggtggatggatggatggataaatgggtgagtatatggagtatatggatggatgaatggatgaatgggtgggtgggtagatggatgaatagatagatgaatggatagaaaaactgatgaatagaaggataaatggatggacagatggatggatggatggatggatagatggatagatgggtgagtagatgggtggatggatgggtgaatggatagaaagatggatggatggatggatggatggatggatggattcatggatggatggatggatggatagatggatggattgatggatgggtgggtgggtggatggagggattgatggatggatagatgggtgagtagatgggtggatggatgaatgaatagatgaatctatagaaaaatggatgaatggaaggatggatggataaatggaaggaaggaaggaagggtgggtatatgagtgggtggatggaagaattgatggatgggtggatggacgggtgagtagatgggtaggtggatggatggatgaatggatagataaatggatagaaaaattgattaatggcaggatggatgggtagatgggcattagatgggataagaaggggaagactaggggacaggtctcaaggctccctacccatgcacaaaagtgtgcaccacagaacaaaaaagaacaagtatttctttctctctttccagcccctatttaacaagacttaatcaaaacagaagtaatcctcatgccaatctcctcttgtaaaacaaacttaatgcctatcaaaggattgaaatgtatacgaagaaccactttagagcaacatgaacacatgcacatacacaaacacacacacacacagagctacattgtatggaagaaggaggggtcctccaaagcacacccatttctaggaatgtgtcaagggctggtataattgaccaactttaggacttagtagagattcagcctcattcctggttttgcctcctctcaggtcacagcatctggaatgggacctttgaagaacaccctcccttcgatgtgccagatgccaatggcagcttccttcccagtgcccttgggggcttctacatgttcctcacaatgatcatcctgctccaggtaggaagccctccctaactaggggcccaataagatatgtggccaaaactcctacaactttgtaaaataaagaaaaaacagtgctggccactagaaagtacaaactggattgagatgaggagatggtcatcgctttcttgtgcgtctttgaaagtattcacattttgggtgatttaaggacccagccctgccttgtggaggggactctgcccccagataatagctggagggaaatatttattagcttttctatttaagatgacagcagtgacccatatgtgcctgtccctttgccagaacagataaaacatgaatgatctaggaacaaaagaagataaagtagcacagtgagcgacagagaactctctgccccaacattgagagagagaaatcacgagttagtgttttaacatttgatacattgagaaggaaaagaacagaactggcccaatataggacagaagaaaaaagtgagacaaatgtgagacagtaattgatgaagagatgaattttaaaaccttcgtgtctctaagaaaatacaatcaatgaaaagatgagggaagttgtagttttccttttgtggagctccatctaccatttcttgtagtattggaggatgtttcattgccctcttattggtgattattttccattcatcttgcagagtaatctattttaaatgcgaattaaatcatacccctcctatgtacagaatcctctcatggtttcatatccactcaaagtggaatccaaagtccttactgtggctgatgaagccctaagtgatctggaccctgactccctccctgacctcccctcgcagccctctccccctcctcactcacctgcaaggcctgctccctattactccccaaacgccacccccactgccaggcctgtgcctggctttctcctctgctcggaacactcctcccccagataacctcacaactcacaccctgacttcctcatatctctgttcaaaggtcatggtttacaagcatcccacccagccatcagtctaccctcttttctttattcttcctcatgcaacttaccaccactcatatatatttatttgtttgttctttgtcactggaaggcaagttcttcaaagccaggaattacgttctgttaactcccatttccaggacttagaacagcatcaaatgcacagcaagcacttggtaaatatgagatattgaatcagtggggagaaattaacaataggtctgaatacctataaaagcgggcagcagcccttggtggcacagagatctaaagggagtcagaggactctaaacagagatgctaagtctctctcactccctcccagctcagtcacagacaaccaatggtgactagacatccctggtcaaagaagacatacctgtttttcagattcccctaagaattccaagggatgcatgaggtcattgaccgttaatttcacagagagtctgtcctgtgagctgacctcaactttctatgaaatgcctttgctacctgctagtgaggatcccaagggagggaacctgcctggtttctgaatggtagaaactcatctcttttcaggtgctgatccccatctctttgtatgtctccattgagctggtgaagctcgggcaagtgttcttcttgagcaatgaccttgacctgtatgatgaagagaccgatttatccattcaatgtcgagccctcaacatcgcagaggacttgggccagatccagtacatcttctccgataagacggggaccctgacagagaacaagatggtgttccgacgttgcaccatcatgggcagcgagtattctcaccaagaaaatggtatagaagctcccaagggctccatccctctttctaaaaggaaataccctgctctcctaagaaacgaggagataaaagacattctcctggctctcttagaggctgtgtggcatttccacaagttgcttcctgtatccctgtggtcttccttgtcacagatcagggctgttccaattacttgtaaactttcatttgtttacaaaggttagaagttatcccatatgtggttccccttcagctgatctttgtctggtgccagacaaagcactttatgagacgagttttttatctgtcagcaatggattggagacatttcccaattgtgtgccagtcacacaaccaaggcttaggaatttctcaggccaccttacctgacatgtcagggcaggtctgtgtctaggtgcatggtcagatttaatacatccagaagatgtcttctattctaacagatctcttagcttgtcactgaggcaaagttttgatttaggagatagggctataaaatgcctggactgttaccttgcatggactgaatatgactcataaaactgatctgattccttcagccatcatctgcccaacttcgttcccctccccacccccccacaacacacacacacactttctaagaaaagaaaagaaattcttttttttcaatactttaagttctgggatacatgtgcagaatgtgcaggtttgttacataggtatacatgtgtcatggtggtttgcagcacccaccaacccatcatctaccttaggtatttctcctaatgctatccctcccctagcccccaaccccccgatgggctccagtgtgtgatgttcccctccatgtccatgtgttctcattgttcaattcccacttatgagtgagaacaagcagtatttggttttctgttcttgtgttagtttgctgatggtttcctgttcatctgtgtccctgcaaaggacatgaactcatccttttttatggctgcataatattccatggtgtatatgtgccacattttctttatccagtctatcgctgatgggcactggggttggttccaagtctttgctattgtgaacagtgctgcaataaacttacatgtgcatgtgtctttagtagaatgatttataatcctttgggtatatacccagtaatgggattgctggtcaaatggtatttctggttctagatccttgaggaatctttgtcttccacaatggttgaactaatttgtactcccaccaacagtgtaaaagtattcctgtttctctacatcctcttcagcatctgttgtgtcctgacattttaatgatcactattctcactggtgtgagatgttatctcattgtggttttgatttgcatttctctaatgaccagtaatgatgagctttttttcatatgtttgttggctgcataaatgtcttcttttgagaagtgtctgttcatatccttcacccattttttgaagaaaacaaactcttaagagagaagtattcattcttttgagtgtgagggatggagaaagagaaagatggagagagtattataagcagctgtatcccctttgccatggtgatagcagaccattcacatgggagcttctggtctctttgtaataataataagagccacattaccagtacttagagtatgctagttattttaacacattgtatcattaaatcttcaaaacatccctatgagttagaaacctaaaaaaaaaaaaaaaaaaaaaacctctgaggaaataaagtgacaggttatgtcaaagctcaaagtcacataactagtaggtagtccactagagtttgaatctgtgggacttagttttacccttctttctccagtcttggtagcccagatgccaatttttcagagtagcataggcccttcccatgctcttaccaccccccacacaaagtctaggttttccccaacatggtccagccgaggtacaactagtgcaataacaggactcctttcttgcagctaagcgactggagaccccaaaggagctggactcagatggtgaagagtggacccaataccaatgcctgtccttctcggctagatgggcccaggatccagcaactatgagaagccaaaaaggtgctcagcctctgaggaggagccagagtgcccgggtgcccatccagggccactaccggcaaaggtctatggggcaccgtgaaagctcacagcctcctgtggccttcagcagctccatagtaagtcctgacttttgcctttgaactgtaagtgttctgtgggaagagagggagggtgctctggaatgtgaaaaagaaaaaattgtacaaaccctgaagagctttcaaaatggtgcccttggttttgtacatactccacacatgtgttttgttggcatagacaattcttgttcattagaaatgttcaatgtttagaaatcagagattttatgtaagcatatagacttttttgcttctcttttaaaaattgaattataaaaattctccacactaagccagcatttcctcatggcaacaactggcttgggttgagaggtccctaactcttagactgggcatgccatcttcagctcatcacagccccccacccaccttctctatgtatcccgtcactgaggtggaggcaactgcatactcattatgcatgtttttaaaattatacagttaggagaaattagaaatatttgttatgcttatgtttctataagggagaaaaacaacagataagcctgtaaggcatgtgtgtttgaagaaaaatggaagaatatactttttggtgatcaaaaataagttttaaatagttatgaagtaaataatatctatgtcaagattacccagaccatttcattcccttaactaattcccttcggcccttatgggcattgctgtttgtggctttggtctggggctttctgcgtattgtcctttcacatttgatccactaggatagccatcagcaaacatccaggtagcaagcaaagaaaaccaagtttctccccagagatcacacagcattcttagaagtcaaggcaagaccagggcttctgcccactgtcctattcctctttcctttgcacacactctttctccggggaacataaaaacacatcatctggaatctctgcacttgcacaagaggccacagggagccccagcaatcttgaacaagagatacatactaacagatgggacccaaagggctaccatccctttattagaaaattagattataaaaatggtccttttggccaattttttcccagtcttttatttcccccatgaatacacacacacataaccacatatatttaacattttttgtaatcatggtacatatcaattgtagatgctgggattttctttaacttgatatcaaaaacattttccatattgctacttagtattcataaccaaggactgtgttttctgactgtgacaaagaagaaacactgtgagcctctgttctgggtcattactcatctaactttgggtgaggacaaagttgagttccctctcgggttattgtcatgcacggaaatgcaacattagcaaggataaggcaagaacagtgtgttaagacatatgaccttcataaatacacaagtgaaatgatccatagatgtcttcaggaagattttcatggttttttttattttcccaaacgagataataacaaggtgtgtatattgctacatccttcttaattttgcccccataaatgtaatgcacttccccgagttattttcttaaatatttgtaaaatgaccttagtgaattctcattaggcacagattctgtgtgtcgttggcatcttccagttctagataccacaggcatcccacatgcctgagtatgtctcccccagaaaatgagcgggagaaaaaggaagctttcctttgtggatctcagttgggtcacatcaattcactgccccttgttcagtctgacaagtctcagcagcccagaaaaactgcatccctggtccaggcagtaaatcttggatgcagggcttttagctgatggccagtgagagggacacactaaccccagagctatctccagatcctagatgtcatcatcctgccctggctggcagtcccaaaggcaagttctgactaagttcattcaggagcagtaaggaaattgacacgagttaagttccaattcttgttgcctggtgaagggaagatggtgatatgttctttttatgaacagctaagtatactcttatgtaataaggtcacttaaaaatctggggttagtggaacaattgtatttttgagtagttttgaggaagggcactgggctaagagttaggaaatggaggttctggttttagttctgctactggcttgctgggtaaccttaagcaacatgttaaacctccttctatgtctctttcaccacctgaaaatactttacttacaattctcaccaggctgttctaaagatcaaataacataatgttttgctgacctgcaggctaacttccagctatgaattaggcacacgtggagtctaatgtgtcaggttttcatctcagctaccccatgtactagctctgtgactttggtgggcttactgaaatggaagcctcaacctacccattgttaaaatgaagacaattgttctggctcatgagtttattttgaggatttaattcttaaaattgtgtgttctagacagatacctaatggaagttttaaatgatctttctaaagggaagctgtctgccttgaacaaatgttcacatatctgatgtcataaagagaaaatggggagtttccatgaaatacagttgttgaactctctcccctgagatcctggtatatttggtcttgtgtgagtcctgagcacttatattttaatttctgataattctaaggagcagccaagatggggaccctccataagcaggccatcaccccaccaggaaagagtcttcacttggctcaaattggcactttctacagcttgggaggcatttgctgaagggagtgaagtatgcagcctttaaggactcttgtgctaacccatcaaatacatctagctggtgtcagatccttgaagccgtccctagagagctcctgtggcagccccaggtggctgtctcggtgcccacccccacccactcctgacagactctctgcacttgtccccttccacctgccttctgtgccttcctgcacctgcccatctggcacccaatctgttctgatcatctcttggaatcaccagttctttaccttcccttagtgaactcagtcaaaatttgcctctgaaacctccagggagcattctaccaccttctaaagaagccagttgttggcttccttggccctttgctctaaatcaaaaataacaatcgacaaaaacagcaacaacaaaagctgtttttttttcttttatgacaaaaaaaaacaagaaaccatcagtgattgtcacctaattgcctgcaataaaatctgtggctttaaggtgggggtaatatacttataaaaatggtgagttgagtcccaagccaatgtttaatagtactggcagatggaaaatgaaatgggttttttttctccttgtctgtacgcagccaagatttcagcagagagtctttgtgtaaaaatgccacttgcagaatgtttttcagtgccatcagaccacagaatatcttcctaatcataaaatttgtattggggccagttaggctcctccaaacttccacactgctttcctttgtggacatcccccccgccaccccacccttctgaagagaatgcaacagagaggagcgaaggaggtgtcattggacctctgcctcctttcactaatcttggtctgcctttctttctttggaagagatttatgcagcactcccagtctgctccaaatcggtgggacagcccacatacacacactcccactgtaaggttagataagagtcctgatttaattagccaagtacacagaatctttctggaagtgatgtgatcacacagggcaggaagcagtgaagcctatctgtactccccttgttccccagtgtctcaaatcggggtggggggacccagcctcagtgacactgttcacaagaggtgggaactgacaagatctggaaaactcccttcttgcttcaccactgagtttttttctttgggcttatgccccgtttgggaaaagcttcccctaacaatccatgtgttcctatttaagtgagcatttactaacattggactttcccagttcttgattcaaactaaatgtcattaaggccagagccttagacaggacaaaaccatcactgccctaaacagtgttagcctccagctccccagcaaccaggaaaatgttgccataatagtcatagcccacagggttacataattgaaaggaaccaaaagctgatggtggaaagtaagtgtccctccctcctctcttcccaccacctcaggcacaacaacgattagcagcttctgtgtgtccttcccaaaggtgcacagaaacagacaagtatggcatatacacaagcacatccttcacaagtggaagcataccgttcccactgtttaggactgtgcttttttaacctaatgaattttaaagaatatttcctatgtgtagacagacaggtagacattcaatagagagctgcctcatcttttattttttttaatgactgctagaattcgttggatggttgagccatcatctgtttatatatgtgtttgagtttctctacagtattcttagagcataattgctaaattggccagtatgtgcatttttttattctggttgattcttcccaagacgttgtaccagttgagacactcaccaacaacaaacagaagggcctgcttcttcccacctctgccagtgtctacatttctttagaagagcctttcatttattgggtcagtcaacaaacattcagtaagcatctactctgtggcatatactgtcctagagactagggacataaagtctaatagaacattgctcctgctttcaggattttacagctcaatgaaggggcaaaaggagcaccagtgactatgggacaatgctctctgggctgggatgtgtggttgcagaggtgctataggagcttagaagaggtgcagctatatcatactggggcatcaaggaagcttcctggaaaggttggcccctgggctgaattttgagacaggagtaaatattaactggaggaataaggagaccacctagtgaggagtggatgaggagtgcaggttgtgagaggagacaatctgtagaagcaagatggagaattgtagttcttcggagtagctggaatgaaaggtgcaatctgaggaggaggaggaggaaatagagacataagaggaactatgccatgaaggattttcttcaaagctcaggaaccagggttcctgtttatttccttctctggattcctgtagcaacaaactgctatacctgaacttgggcgagttattattaaaactgaaagaagaatagcagagtagagtttggcctacttttcccaggcttcattgtgggaacacatcccagccagaaaggaatgaaaacagtagggttgtcatgtaacacagacccttgctactccaactgtggtcctcggagcagcagcatgaacaccacctgaaagtttgtcagaattgccaatgctcaggccccactcggagctgctgaattagaatctgcattttaatgagatccccagttgacatgtgtacatgttaaagtttgagaaatgttggcatagcgttaaagggtttagactttggcatcaggcagtaccgaatttaagtcccagcacattatctgcgattttatgacctgggacaagttacttaacttcaatgagcctcgcttgtttcataattaaagtggaatgatactaaccatatcagtgctcttaggatgattagataatggatgtgagcgcacttagcccagtgcctgactttgttatgctatgcattctcagtaagtgtaatctaatgataataggacccttgaggatatcgtttgagctcaaaaatcagcttcctcaaagggggtttgtatgcattttagatggtctacaatggaaagaaatccaactagttgagtgtctgcctgccacaaagctcttacataaaaaactggtggccccacaaatgtatatttctttttcttccgagaaatagtctggacaatggtcagcaatgggtaaggacactgctttctttctaagtgctctaagtgccaagtttctaaatgttaatggtccacatgggaaaccagtgggctggagcaaaaggagccatgaagagccttgccctgtggcaacaagtctgtggtgactgggtaaaggttagctgacatctgttcctggcacctgcaggatgagccagggccttttacagcgaaggcctttgttttaatgcattgctacaagattggatgggaatatataaaagagtagttttaatgaacagacagcaggagttaatcagtggtgagctattgtggtatcctagaaaggagtcagttaacaaatattttgagtgcttaacaatccaccaggcatgagggacacatcagagacagtctctgccctcatagcacttacagactagtgggtaaatgaaaatggactaaataacttgaagcatgttaactgtgtcagcatttggaaatacataatgcatagcttggaacaaagcagtgtgttataagaggatgggagtcaggtggtatgaaaactgtcctagttctgaccctaaatcagtgtgtgatctcaagcagtttcctccttctgacactcaattttggcatcaggaaaataggggatttagctttgacatctccaagtttgttcctcaacttgggtacctgtggcagtaagatttaacagcatctcatttatgtaccctccccctaaaaaagaaatctattttctgaaaaaatgaaattttccataatcccttttatcactctcatggactatctgctgagccttaaggattagatatacaaacgcatctattgtgtttgagatgcccagacactaaagaccctgggtggtagcaagtctcaaaggccacttctttcacatgcaggatcttgcctgatataggtgttaagattatgaattctagggtcagactaactgaaatcaactgaaagaattcctcccacttactgtgtgaccttgggcaagacaatcaacttccttgggcatcagtctcctcatcttaaatacagagacaattgggaggatgatggtactaaatagataatgttactgcagggatataacgaggccatggatgtactagaacataagaaacaccacatgaatacgagctgtcattactctgttgagaaataggtttggagttccttgagtggtgttggtgacttgatgacaaacactagatggtccctggaatctggttttagaagtttgcagagaaatattaataagagaacatactgtgaccacagaaatgaaaaaccttagactagcagttcaggagtctgagctctgattctggctttacactaactcactaggcgactttggtcaaatcagcctgtctctatgggttttagttaagtcgggattcatttcatctcaacttgggactataagaatctgatgaggttatataaatgacattgcttgggaaggtaagaagagtttcacaaatgtgagcgcctactaggaagactggagtcaaaggcagagagcatggataatatgtgtgtgcccttctcaggattttggaaataatgacaccacatggtatggatggttcacacaattgttttcagggcaatggaaggaaatgtaggtctgattcagttttattagccctcttgcttctggtaagtagactttttttctggaagttgtcttcttacaatggtatgaacaagttggggtgtgactgtggactcctgaagagcacccagaatgaaggctggtattcttgaagagtgtgtgctccattcttgtggggtatgtctgagtttcctcccctctggctctcctgtgccagcagccctagggaggacagaatcagacctctgggagtcattgcatttggtagtcagaaaagtctgagggctcttttcccatgggttttttgtttttgtttttaaactctcaacttgggtaaagttcattggccctcagtcttcaccctgcacaaattaatcaagattccctcagtctatcattttcagccattgactgtcttctaaaccgtgatttagctgtgaactcagaacactgataggaatggtcttatgtgaaagcattgtgcaaaatggcttttgtcatatctaaccattgagagctggcatttgttgagcttctgcttcaaaaaagctgtagttagagctctaggaaatacagcctcatggaaaactcaacctctctatttttgaggctcttaccttatctctagagagattaaacaaggacataagaaaagtgaatttaaaatacaggccaaagcaagatgccagcagggagatagacaaaaccagacaccaccactgccattgccaccaccacctctgctctggttaagatctcactgcctgagagaagcttttctggcatcagatccctggggtaaaatagaggagccagagcaagagaaaataagccaacaaataacatataggtcaatatgtagtgaattccaaagggatggttcaagtggtaacttctagaaagatgtgaaaatctggaaatccatgggtcagatccagcccgtcctcttttttcttccaaagaagaataggaggaaaagaaaaaaaaaaaataggtcatgcatcatctttgctttatcttgaaaaatcaagagacttggcaaactagaccagtattggagcattacactcagcagagcagtagctaccctttagatagtggtaggacttgctaggtctcatagctcccaccaccccataatgtcctctactctacattggcccaccttcctcattcactttacatgcctgactcctgtggacattctgagttaagaatctgctattgtggttcaggagaaagagacttcattgtgagctatataggatctcacggacaagcgggacttcccatggttattgaagtctaggtaggattttggtaggtagaagaggatttttcaagcaaagtgtgatcagaggaatacaggagtatacatccaagaggcagcaaacagaccaccaggctgagctgagggtccatgttgagaagcatgggaataaagagtgaaaatgcaaactgtgaaagaatctaaatgccaaataattgatcacgctaacaatggatatctcctgaaggttttttgaagtcaagaatgccaggaggaaatggagttttaagaagactgtgcaggtgatacataggaaggattagaaaaaaaaaggtgagaggcaacagtattagtttagaggctggtgcagaaattcaggattgaggggtagagggtctcagcatggctggaagcaacacaaatggtgggaagacactgagagtgaagaactgtcagcatctggtaatggatggacatgtggcactgagaggcaggaaggactcaaataagaattggcaatggccagacctgtgggagaggaaaacatgctggatgcaagactgcaatgaagctgcatcatcctttccccaggcatgtgaagattcttctggagtgggcttccttcccagaaaagactctcattctggcctttctcttccaggaaaaagatgtaactccagataaaaacctactgaccaaggttcgagatgctgccctgtggttggagaccttgtcagacagcagacctgccaaggcttccctctccaccacctcctccattgctgatttcttccttgccttaaccatctgcaactctgtcatggtgtccacaaccaccgagcccaggcagagggtaaggaccagcgatggctgggggaggagggtaaaggaggtagaggagtagaaggcagggtaggggcgaggggagaagttctgatcagggagacatgaaatttgggtcctagcaacagtgtcatttcatcacagtgaaacctagaataggtctcttaccctccctgggtctgtttcctcatttttaaataaaatggaaaaagatacatatgagctttctgtgtagctttcaaactttgtctatgtgtctgcaggtagacattaagagttagtgattactgagcacttggctttatgccaggctccatacccagcactttacctgtattatcatttaatcctctcaacccagcaactctatgaggcaggaccttagatttaacaagcgaagaaatagtagctcagaaaactcaaggtaatgaaggacatatggctcataaatggcagaaccatctatgcaattccataatggtttctagtaatattgtgctatattgctctctgtttttatatacgggttaaaaataatactgtgtgtaatgttcttcccatggaaaaaaatgcagctgaatggtcatgtatgtgaagttatactctgaaatctactgaaggtggatttgccttcaatcttccacagactcttagccaatcacccctgtgagctgtgagtcactgagagaataattaggtggtacaacttgcaactatgaaaccaagacaagaagtttcacccaggcactaaaccacaacctcccttcattatgcccagattccaaaccaccctgaaaatcacttcagcactgaaaagtcagcatgttatcagaagtcttcaggaagtttttggaggcagaaagctttatcttaaaaattaattcatttttaagaggggaagaagtaccatttggggaaagacagtaggcacctcccaattttcaagttaatgtgggagcttcagctggctgggagcttcagctggcaggtagctcaagagcccagcctctggagtcgaggagacctgggtttgagttccaactctactccctacacactgggtgatcatggccaatttatgtagactttttgtacctcaatgtcctcagccataagttgggttgatgatagcatcccacagaattattgggaggatgaaatgagataccgcactcaaagataaagcagaagcatttatagtgagagttcaggaaatgtgaacccttactatgagtttctgattctcatctccttttccttcctttctccacgctcacagtgggatgatcaaaagatagtggaaaatgaccattgtcaatgcttagaatttcagggctggaggaaaatatctggcttcacttattgcaaaagtaccttcatattccgcataagacaacttggtattatttccaacattgagagtaatattccactttccttctttggccacaaggtcaccatcaaaccctcaagcaaggctctggggacgtccctggagaagattcagcagctcttccagaagttgaagctattgagcctcagccagtcattctcatccactgcaccctctgacacagacctcggggagagcttaggggccaacgtggccaccacagactcggatgagagagatgatgcatctgtgtgcagtggaggtgactccactgatgacggtggctacaggagcagcatgtgggaccagggcgacatcctggagtctgggtcaggcacttccttggaggaggcattggaggccccagccacagacctggccaggcctgagttctgttacgaggctgagagccctgatgaggccgccctggtgcacgctgcccatgcctacagcttcacactagtgtcccggacacctgagcaggtgactgtgcgcctgccccagggcacctgcctcaccttcagcctcctctgcaccctgggctttgactctgtcaggaagagaatgtctgtggttgtgaggcacccactgactggcgagattgttgtctacaccaagggtgctgactcggtcatcatggacctgctggaagacccagcctgcggtgagtcctgccttaccagggttccaggcacagagagttctatagtttaagaagcagtgtggaatggtaataagaagctcaagttgtagtgtcacctggtatggcaggtcccaactggaatacagacctacaagatgttttcctcaaatatccttaaaacatgctgcattttacatctcctggacctagggaatcacagtgtccattagcatatttaaagactgtacagtcttgtagcagataaacatctttaacttcatcccagttttccaaactcatttaaacatggattatccacacagtcttttgcactagaacatccattatcttaccatggaacacattgtggtcctaactcttcattttggagaaaagcacactcaacttagaaagaaaagtgacttacaagaggtaacatggttaactagtgttaaatcccagacccaggtatcctgaattccaggtcagagcttgtttcatgctgccagaattctgcactgggcttggtgtactctgggaagcctcaggtgttcctctttattatccttttccccagcctcccccagatggattttcataaacgtgcactgagccagaaaaatgttccaaagtccctacatatcagtgtccaattttggaacagcatgaattagtgtgcagccgcttcctgattgctaacaaggagaagacagttatggggctatgattctcccaggatagtagattccagccaagcttcagaattgcccaggcagccctgtgcctcctgcattatcagccatggatcagggccaagaggtttatggggattgattagtgtgtagaatgggaagggagctaattagttctctttattcccagactctggcagacaagtgaattcagtacttctgagtcaagggagccacggcactctatccctcagcagccagtcatccaagctgccctggagatgtctctttatttgctcctcacctgattgaaaaatggattagagatgccttcaatagaagtcacacacacaatgttactataagaattgagaagcaaaactttgaaaggagggagaaaatgacctcaggtttaataatatttatggtgtttaaatgttcaatttgatgctgaggttcctggcagccttagcaagaaggtaaactccaaggcttacaagtaaaagacaaacaggtttaatctcaggagctggtgtctttaaaaataaaatattgtaaatagtgccgaatcaggcgatgcacaaatgaagactatgcttaaggcgccagcaacacctgaaaaatgagaaaataatctttgaaacaagttttatattatataaaaacagccttggagtagtatcatggaaaaatcagagttttgttggacttcattatacttttctgttaagaattacatttttaattttgcattatatacaaggatgggtgaggtatacaaattctgttcaatcttaggacctttaaaaaatctcaatccagccctggtaaaaaatgattctgaagcctagctcagttttacaagcgactgataaatgatgtctgtggcagtttagataaaggaagtgctgatggcatcaatcccaccccacaccagccaaccttggctgaaaaattcttattatagaattagataaaggaactggaatttcaagagaaaaagacaaattacctctgacagaaacttatgtacaactttacaaaggggactttgagcaacacacatatttttcatactacattcataggaaatgcataaaagaatgttttctctaaacgtatttcttgcattgagagaaggcctagctcagctaaacaaatgaaatgaggaacttagctaatgagatccaggcttgtagatgtcttgggacctaatttgatataagacctcaagtagaagatagagaagatgataaatagagaacagtttccaaagtcagttggccatccagagatcaactaaaaacaccttaggtaacaataaagattcaaacttctagtcccctgattcagctgggctttaactggacctgagaatctcaattattaaattcccaggcggttctcatgcaaacagctgtttgggaacagtaccttagaccacctaccttccttacatagcactttactcagccaggcttttgatgaaaagatgtagagagcagacagcttaaggactccctgcattatcttccagggcaacctgacagccaggagagctccttcaggtttctaaggtgggctgtaagggattccttctctaaagtatttgtagtctactacaggagattccagggtattggggatggggatccctgagcatttgtatgtggcctcatgcgggaaaatggctatttgacagtacctgacattaatatggaaaagaagctgagaaaaatccgagcccggacccaaaagcatctagacttgtatgcaagagatggcctgcgcacactatgcattgccaagaaggtaagaacaattcctccaagcgtgctttgaatatcattaaatagctgaatggccttgaccctgcttctttttctttataaaagacccttagaggtggttgttttaacattttcaagattagctgttctgacttgccacaaaaacccaagacactgacaattttgtggaagccaaaatctgaagagctaggtcccatatcagtgtggctttgccatgccctgcttttcattatatgtgtaatgggtaacacacaactcatgacattttttcagttataattttgttttccaattatattttttaggtatgcattattttcctttaaatttggggaccttttatatggtcacataaaaatctagatttccggtttcttttaaaaatgtagaggatctggccaactgtgttttcattctagaatggcagcaatcagctacaaccaggaagaagttgattcctgtgatgagggatatgttcagctgtgttctgtggttggccacagtccctaccactctctacctctccctatcacattgcactcagcccagccatagttttgtagattacctaactcatgctttgcaagatctttgactttgcaacttctgcaaggcaggcaggcagtgagggctgcgaattgcagagtgtggacaccgaatgagtcacccaaaagcaaagctaatggggtgctatgatgggcatacatttctagatggctagacatgggttctcttgcataaatccccaggacttttcatgtcttttatggttcttaggtcagcattagagatcaggagtgcccactttaaagccagaaccacctgggtactagtcccaatctcactacttttagatgtgtgaccttgagcaatttcttcacttctgagttttatctgtaaaatggtgctaatcagccctccctcatgcagttgtcatggagattaactaaaataaccacatgtgcagcacctgggacagcaacaaatgcttactgctactctgaatcagtattacacccttaccaccattttctattaaagttatttgtgcatattttgcctcccctaatggactatgcattcctcaaaagcaaaaggcctacttgttccctttcgttttctctatagtgccatgcagagggactcagggaatatttgatgcttgaacaaaataatttttcattgctataagacaccatatgcatgtaatgtcaacaggagggtctaaaatgggactctgagggaagaagatgtggccactagctggattattccagctactgggcactccatgtgtatgacaccatgcctggtggagtgctctacaggctgctttctttccagcctcatttctgaactttctccgtctttcattcaaggaacagaaggaaggccaagttcattgccgttccacagccttaactcttgctcttgcccatgattgaccctctgtcattggatctcagcttgcaggtcattttgtcgaggaaacctaaacttcaaaagaaggcagccccctattcagttattcttctatcccatcacactttctcatatcactcatttactacctagcattccctgaaataactattttaaattatttatttggataatacccctcaccttccaccaccatataagcccaggcatgcagggaccttgtctgtccagatcatctccagtgatctgagcacaatagatttttagtgataatggaacacaaggataaatcttcattaatttacatatttaaaaaaaagtctttgagaagaaagccccatctaattatgtagggaagttcaaacaggccaataggagacccagcaggtgggaagagagaggaaattatcttgttggtccacccaagattgttaaggagccttttcccatcccataggttgtaagcgaagaggacttccggagatgggccagtttccggcgtgaggctgaggcatccctcgacaaccgagatgagcttctcatggaaactgcacagcatctggagaatcaactcaccttacttggtagctaaaaataagtcattattataggaaaaaaggaatgcagccagttgagaagggagctcttggccccgattctgacactactaatatgtctccattagcagccttccctggggttcccttccaggtatttggcacaaatgggccatgccaatacccaacccagacaccacacacagcttcctgaggatgctctgggagcattcctgcattccctgctggaagaagcctctgagtttggctgcttttccaacagcacactcttcccttcattcaaatgtttgctaagcacctactatgtgccaagtgacatgctaggctttggggctgcaacaagggacaggagccaaaaagtctgccctcccagatcttggagtctagtgaggatactagatgatcgagcaagcaatttcaacagactggtgagagctgggctagcagatgggcctggtgggatggaagcacaaaaagtaggagatgccagcctagcacaggggtgagggagggtctaggaaggcagtgaactgaaagcaagaagagaagctggttaggcagaggaggaggacccaattgaaggcctggaggtcccgggctggggggaaacagagtggggagaaatgatggaaggcaggaaaggtcagcaggacccagattatgaagggtcatgtcaatcagctgctaaaggtttggagagggcagagggtgaaagcagggacagatctgtgctttacaaaaactgctgcttgctgcagcatggaagttagattgctatgctgagagagagaagagaagcacagagactgattaagagacaggctgtgcttctgttggaggaaaggcattgccaagaagcaaggggagctttattcaacaggattaatgtcctcacaccttgggagcaaaatctgggtaaacaatgcccaaacagcatgcactggccacgtggcaaaaagccttctttattcttggtggacagtgttgacctggggatgaggaccaagttctggacagagacacactcctctgagacttggcttctctggatgagtcacatgcctccagctgcccagccaaataggagttccaaggggaaagacccaaggtcactgtaaagtggtgatgctggcaagtgggatggctgacaagctgaggagggagaatggggttggggcatgcattagctccccacatccttcagcctttggtttcctatgtctcggctgcagaggcctctgcttgctacctcataaggtcccctttaaagctgaacacaagaactcacttgaacaggaaccagaggatggctgggccagacaactctatctgccagatgatgccaccagaaagtcatcccattcaggctcctgatccctttctcccttcccagaggtttcttttgtttcatgacagcactctaggctcagtctgtgagaggtgttcctccggttcttctgggtgaagagaacacacttatcagaacctgttggcttcccctagctgggaaaggctttcacaaccttcctgtttcattttctctttcacacaaataaatgtgtttttcctcctctctccttcactctgcctcaccgtaataagtgagcttcttctcaccttccagactaacgcttataggggaagatgaggctcaagccatcactttttatggggttgtttacctgtgcatatggccctcagatgcaaaacaggcacatttcaggataatggggttctttgtctcccctcaagatggcttggagaggactgggctgagaagagaattccactttccaccgagaaattggcacaccactaaaaagctgtaatgccttcatgctgtctcaaaatatgaaataatcttttcaatatgcatccaacgtaaccactttgccaacctattgtcactctggattattaaaagaaacaaaatgccgtgctcctgcccagagtgaaatgggtagccattagtctgtgatctgaaatgaatctcaattgaaaagcagatttatttttgcttaatcacttagcaactattcaatatttggatatctattcatcagggctggtgcaaagcttgagatccttcaaaaattatggaatctgcatgtttaattcactccaagaatattatcaaaaatatgagtccctattaattctgctttgatcagttgcagggcaaagatttcagtctttccacttctattcctattgctgctaggccagtccaggctactgctgcctctcctctgcagtcctgcctggcctcctaagtagcttttagttctgaatctcatcctgcttttccaatctcaaacctattctctagaatgatattcttaaaagtcaaaactgattctatcactccccagcacaacacccttgaataactttcactaccaccaaataaattgcaaatcctttgaggccctgacaaggctctgcccagtccagcacccctaagctccttttctggcctcatctctcaccttgctctgcctccatttctgcatcttcctctactgtagtctctgggacttcacacacactgatccctctacctggaattttcctcctctgccacctctttgcattatctcccaggtctcagtttaagtagcacttcctcagcataagcccaccctgattttccaggtgaagttcaggtctcctggtgtatattcgcatggtatcctgactttctttcattatatagctcagttataaattcttattcaatgaccattgaactcagaggtagagacctgctccatctagttcactgttatatcctgggtacacagcctagcacagtgatgctatccaataaacattgcctggcttcacatggctttgggggaattaagcaactactcttttacgataaatgtgaactctgttgtttttcatcactccaggagccactgggatcgaagaccggctgcaggaaggagttccagatacgattgccactctgcgggaggctgggatccagctctgggtcctgactggagataagcaggagacagcggtcaacattgcccattcctgcagactgttaaatcagaccgacactgtttataccatcaatacagagaatcaggtgaggtgattctctgtattgatatctgcagatatcaacgtgtagagcaacccctcaaccaagaggacacaggcttctaggtgggatttgggtacaccagggaagcacccaacccccaacagatcactgaatcttggagtctagaggaccctggaagtcatccagcccaatatcctttatctcatccccacacatggctagctggtctcttttacattacttctggcactgcttgttagaaagttttacctctcccaaattctactattggtctagtctccccatttccccacagataaggaaactgaagactactggggctaagtctcttgctcaggtttaccctgcttatttctgataggtagaactaagtctagaactgagctagtgctatttacattctaccacactgtttgcttatggaaactcaactgtcggtttcttactatttaagactaacttatccattgaaaaagtcccaattaaattgaaattattcagagcttaaattttcagcatcaatttatatgtcaagctggtctgccacagagtaaaaacctgaaaggaataatgcatgaagccaatatgtttttatgggatgagaaagagaaagaatgaagcaaagatctaaaaatggcacttttcaactggaatagattacgggtggcagggagtgaggtttggagagaagactgggaaagctgaagaggcatattcaaagctataacaccgttttgattttagggggaagtatctgttttcacaattcaaattgcagaaggtaaagttccaccacatcttcttggctgatgaagatgggaagtgggcactgagattgtgtgctcctatcagaaggaagcaggggttggattccatggaggatattaaccagaagagcactctactgcaggggtgtgggcgtagggcccgtagggcacctacaccgaggacataccatggagaaaacgaaagaagacggaaaaaggaaaggagggagagaggacaccggactaaattttgtctgaggctgatgtagactacagtagaatgttggggaggtttatatttcatttttattccatgaagcaacaatatacacctcttttttaaaaataaaactagtgtagattatgaaaaatgccagaggacctttagatgaattggaaaaatcatttactttcctgtcaggtgcacagattattagattaaaccttaatgaattttcaaaatgaaaataagctcagggaaaacttgggctttaatattatgcttaggaaggaaagtaattttcagcttgcttgaatgcttgatccctgtgcctgcctgtcctgcttgtaatggaaattcggtttgcaatgattctttcactccaggtaattctagaaggagaacatctgcaaaccagtgaggcagccagccagagggagatcgagtgggcttccatgtgttctgctaaatgccatgcactcctgctcattggttaaacagccaaagctcctaaggaacagtcagccatactccacctttaattcagtcaatgacgaatctttctgtccagtatcttccaggacagtgcctgaatcctcagccatgcctacacccttgggctcactaaacctgtaagattagtcttttcatctctttacctgggatgaaaaataatatgttaagccagaaactggggaaatacattctaagtcttagacttatttaaaccctagtttaatgtagttacatattccgtggatatttcctccaaggtttttaatttgcctaattcactataaattgatttaggattattatctctttgctaggtgtattaaagcaataatcaagttatgggatcgacctagacctcagaattctcatccggaagatgagagaattactaactaatcactgaagtgttcatcagtcaaggaattttaaaaggaactaaagtattagataggaactaatactaaaaccactattattgctattgcaatattgttaataattaacaacctatattgaagttttaatatggctcaaacaccattcttcttgaacttctcttcatctgtaaaacagataaaaaatattaacttcacagattactggtaggattaaataagatcatagaagaaaactacttacttttagtacattacctatgctaattatctattggtacataacaaattactccaaaccttaggagctgaaacaacagacatttattatcttatggtttctgtggattacaagttcaggagcatcttagctgggcacccctagctcaaggtctcccttgaggttgcactcaagctgttggtcagggctgtgggctcatctgacggctcaacaggtgggtggttttggcatgggaaggagttctgcttccaaattcacctacatgactgttagcaggcctcagtttctcactctgtgggcctctccacaggactgctatacaacatggcagctggttttcctcagggctaatcatccaagagaaagtgagaaagagcaccaaattggaagccactgtctttttataacctaatatgggaggtgacatcccatcattttttgcagaattcccttcattagaaaggagtctctaggtctagaccacagtcaataaaaggagattacacaagggcatgaataccaggaagtggagatcactgggaaccaccatattagaggttcctaccacagtataggaggtatactaaatgttcagtgaatggtaattattgtatactttaaaagctggaaataagtaaattaagagatgatttaattttaaagcttatgtctccaatgacttgctttagtcatatattggaggaatttatataattggtgccagtcccagcttccaaaggactactttgatctctttccagataagtgcctctggtataagcatacactcctagaactgcttcctgtggcccgtctgggctctatgcatattctagtgcctgcaacactcaatttagcatcttaaaaggtagacacaggaataataaactatgtctttattctttccaaaataagttatgccagggcagggtgcagtgactcacgcctgtaatcccagcactttggaggccaaggcacgtggatcacttgaggtcaggagttcaagaccagcctggccaaaatggtgaaaccctgtctttactaaaaatataaaaattagccaggtgtggtggcgcatgctggtaatcccagttacttgggaggctgaggcatgaaaatcacttgaacccaggaggcagaggttgcagtgagctgagattatgccactgcactccagcctgggtgacagagtgagactctgcctcaaaaaaaaaaaaaaataagttatggcagacatattcccccacacagaaatctctaaatctctagatcaatgttccccaaccctggcccttcagaactgctttcacagttttttccaaaatctgtatatgacttgtacttttttttacttaataatttgactcactttgaatattatttttagaagaaacttttagcacttcaataaatgtaaaatcatcctcccttgccatggatgaagaaacactgtaaaatgaagacctatgtgaagaaaacaatgctactaaaattgataatattaattcaagatggattaaagacttaaatgttagacctaaaaccataaaaaccctagaagaaaacctagacaatgctattcaggacaaaggcatgggcaaagacttcatgactaaaacaccaaaggcaatggcaacaaaagccaaaattaacaaataggatctaattaaattaaagagctcctgaacagcaaaagaaactaccatcagagtgaacaggcaacctacagaatgggagaaaatttttgcaatctacccatctgacaaagggctaatatccagaatctacaaagaacttaaagaaatttacaggaaaaaaatcaaacaaccccatcaaaaagtgggcaaaggatatgaacagacacttctcacaagaagacatttatgcagccaacaaacacatgaaaaaatgctcatcatcactggccatcagagaaatataaatcaaaaccacaatgagataccatcttaaaccagctagaatggagatcattaaaaagtcaggaaacaacaggtgctagagaggatgtggagaatttggaatgcttttacactatcggtgggcgtgtaaactagttcaaccattgtggaagacagtgcggcgattcctcaaggatctagaactagaaataccatttgacccagacatcccattactgggtatatacccaaaggattataaatcatgcgactataaagacatatgcatatatatgtttattgcggcactattcacaatagcagagacctggaaccaacccaaatgtccatcaatgatagactggattaagaaaatgtggcacatatacaccatggaatactatgcagccataaaaacagatgagttcacatcctttgtagcgacatggatgaagctggaaaccatcattctcagcaaactatcacaaggacagaaaaccaaacatcacatgttctcactcataggtgggaagtgaacaatgaaaacacttggacacagggtgggggaacatcagacaccggggcctgtcgtggggtggggggatggaggagggatagcattaggagaaatacctaatgtaaatgacgagttaatgggtgtagccaaccaacatggcacacgtatacatatgtaacaaacctgcacgttgtgcacatgtaccctagaacttaaagtataataaaaataaatgaattgataatgctgttttctgccatgattttattaaaaagtgatgttcagagaagttgatatcaagaataaatttgaatcaaaatatgactacttttgatataatcaaaagtaatggaagaaaaaattgaaaaaggaaatactttctcactatatttcaaggcaaacaccagaaaaaaattaataagtttatttccatcaataagacttttataaccgtagtccgttcaaaccaatgtgatcaatgcttcatgccacagttcttagcacccttcatggaatacaacaattgataaacacaggtacaatgtatttttttcagttaggaagccacagttcaagtagtaatgatcctgactccactactaagtttggatgatcttgggtgagttattaaagatctcatttcagtctcctcatctctaagatcaggaatacacaccctatctaccacgcaggaatgttctgaggaacaaaggggaacttaaatgacctgtgagaaatagaaagcaccataccagcatgacgtattgtcattatctaccattatattagtattatttattatcttatgccatccttgtgtctatctccatcttgctgagctactttcactcccattcacaagcagtgtcttctattttggctgttaatttggttccaaattaatattcctttgatattatgtcaaatattgcagagaaatataaaaattggagaatagcttgtaaataatctctatggtagtagagttttatgactatcttactaaagaataaactgaaattgttaacatgcatttccaaggttgcttacaaatactgtattattatgcttctttataggagacctgtgaatccatcctcaattgtgcattggaagagctaaagcaatttcgtgaactacagaagccagaccgcaagctctttggattccgcttaccttccaagacaccatccatcacctcagaagctgtggttccagaagctggattggtcatcgatgggaagacattgaatgccatcttccagggaaagctagagaagaagtttctggaattgacccagtattgtcggtccgtcctgtgctgccgctccacgccactccagaagagtatgatagtcaagctggtgcgagacaagttgcgcgtcatgaccctttccataggtacccatcatactgagatgcgggtggcactttggcagggatgatctgatgaaaggctggaccagaggtgggaggtcaggtctcaaagtcagaatgcttaggctgtgagtcattgtcttagagggagagagttcaaaatgacaatcaagatgcagcaactaggggatgaagtgggacagtgcatcaaagttcttgggactagcaagtcagctaaagataaatcagggtttagatggaggtcaaaaccaacaggggccttgaattcagtgaatccagatagctcaagaaatgttgccagtaattatattcagatcatcttaattctgggatacagatcattttccctttagtactttatgcatgccacaacttcaggtgtttagggatttgatattctgagtgttgatggctggtggggagattttaaagattggtactgtctcatgtttaatttgtgtgtttatttctaaataggaggccagcacaaagcatatcaccaatagatgctagcattggttgataaagaatttttcagagggggctaaactttaatcatgttgggacagagaaatgaaaactgcacttacttaacacctttcaggaacaaccaaacctggtttaaaagaatcttcgtgatcttctgttaccctcagccatatctcttattgtggccacctttctttctccaacagttgcctttccatgttccaacaaatgaaactgtttaccattctccatgggccttgtcctctctcacttctgggcctttgcacaagttatttcctctgtaaaacacttcttccaatcctacctaactttgctttcccctgggggctcccacagcacccagtacgcatagctcaaagcactgtcataccttctgtgatggcctcctcagtagaccatgagttcctcgagtagaaagatgtcagccttattcacttttggatcccctgcccagcacataccaagcatgtagtaaatattgccttctcttagggatgttcttacagatggtgccagcctctcctcctcctacacaggcatgggataagattttctttcctaacatttcaaatagaaaccctattaaacgtgatggttttgttcctggttttcaggtaagaacagtagagaataacaagagtggggcagaaagaaagcagagaacaaatttagcaacgacatcctacttttatgcctggaattgtcctcttcagaaattcagacacacacaaggcaatagcccaagaatgattttctctgaggtcagatattggcttcactcccatagcaacagaaacaaaaccagtgtggcgagaaatagcatggtttcacacctctacttctcctggctcactaacagaagagattaaaggttggatttgttttgcatggggaagatgaaaattatgcattgctatgcaatcaagaaatattttagaataaaggctacttatggcaaaacttttaagaccaataaatgtgtcatcagataactagaagaatcattctctccctcccattttatattctatatcataataatataaatttaattgtggcttattctgagaaactgctagaaaacatgtagggccaggaaaagaatgaaggcagcatagtctacaagaacaagggttggcaaactatggcctgcaggctgaatccaacccatggcatgtttttgtatggatactaagaattatttttctatttttcaatgtaaaatttataaaggattaatagtctttcagcaagaataactgttcaattttgcttcttggctcacaaagcctaaaatatttaccacctgaccctttacagaaaaagcactggggagagtttggcttctggggaaggcctcactgtatagagctatctgtggctacttaaatttaaatcgaatttcaccagcaaaatttccatagacacatgtggctcctggtttctatattggacagtgcagatatagaacgtttccctcatcatggaaagatcttgaacagtcttggtatagaaggagaccgtgtgtgtgtgtttatgtgtgtgtgtgtgtctatgccttacctccagtttcctgaaacaactcagttcattgaatggaaactcagtgtgactaaatatatttcaaaaacatgaatcaatctcatttctctacactgagaaacaaaacaatatcatccctctccttggaaaccattgacaatttctgatgatttcactctccaaactgtccagttgtcttgatatggtatttcaagtttgaccgagggaagtgtgttggccctggaatctgaaagatatgagttccatttctcctgggtcctttctctagtggaattacccttgccaagtctctaagttgctcaaattctccatttgctcatcagtaaagttcattgtaacatttgtgaaggcatttttttgaaaactgcccaagtctcttgattaccattatatccccaatacctaacactgtgcctagaaaaaaagacacttggtaagtcctatatttgctgaatggtaaagaaaatggtaggacttattttccaaagaagaaatgacatctctcaagctaagcactatagcaatgactttctatagcactagagtaatgttaaaaggattcaattgtatgtaactggggacactttagagctacctcattgtcactgagcagttggaccaaaaataaagacacgttatgacctctctttcaggtgatggagcaaatgatgtaagcatgattcaagctgctgatattggaattggaatatctggacaggaaggcatgcaggtattgttctctgcaactattcttctttctttggtccttagttgagatacaaggaaatatccagagtgttggagaaacttctccctgagaacttccacccacatccaaagttgcaatgccctccataagcaatgacagacataaggacatttgaaatcattttgcaaatgtacactttcgtagtgtcaaaattcagcttggaagaagcaaactaacttgactgctaaattttcccatttaaacagacattttgtgggttttgagccattaacaattgtatttccaccaccagtgtaaacatttggcactgcttaaatttgttgatgaggatagagagcattgactgggaagctgcagaatagttctgaaatgttaacttttgcgtatctcctatatgccagcaatctgttagaccaggggtatccaatcttctggcttccctgggccacaatggaagaagaattgtattgggctacacatagaacacactaactatagctgatgagctttaaaaaaattgcaaaaaaagtctcataattttgggccacattcaaagccatcctgggccacatgcgacctgcaggttggacaagcttgtgttagacacttcacatttaggatctcattgaattttaataatcatcacaccctgtaagggattgctattccattttttagatggggaaactgaggcacagggaattagaccaaagtttataccaggacttataaacaggcatgttcagtgttcatgtttttaaaagagtactataaactgtgccttgttctgagtaatcccaggggcagaagacatatttcagctccaggtaaaggaagagctgtcacttagctccatctgtgaatggagccaatggcctgactcagggggtggtgaaaggtgttcagaggattgtaaattgcttgaatggaagccccttctctctggttaaccatcacatccctagcacggtgcctgacacttactgggccacagtcaatgcttgctggataaacggatgaagagccagcctagaccactgatcccttctgatctgccctccttggattctagagaggtttggatttcccagaagggagggtggggtgtcagaatccaaaaagctacccaagagtgaccacaacaaggggtctttaggactctgctggccgtaggcctagaccaaagcaacgcccttgagagagtccctctggggcactggcagccatggatggaagctgatgtgtctgttctcacctctcaggctgtcatgtccagcgactttgccatcacccgctttaagcatctcaagaagttgctgctcgtgcatggccactggtgttactcgcgcctggccaggatggtggtgtactacctctacaagaacgtggtaagtagcctatggcgtcctctcacccagggctttggcaggccttgccacggggccagatctctccctagcagtgggcaaagcacctcagcataaaggaaggagtcaggctggcatagtgttagatcttgaaactgttccttaatagctctgtgaccttgagctagactcttcactttctatttttgtgaagttattgtgagaattggcaatgctgtatgaaaagcacctggcacacagagggcagcatgaatagctgcaagtgtagactctggagtcagacacgttgggtttaaatccagattcccatatgtgataatgtccccaaatctcagttttaccatctgtaaaatgggtggtaatagtacctttctcatatttgctatgaggactaaatgagaatttgtatataaagtgattagcgtatcgtaatcgtttataaagttagccttttttttattattgttgctgtcattactcttggagttaagtctcataaatgagattttcttattgtaacaaagaaggatttgaagagctagtctgaactgtatcagatttcctctgtatatagagccagctcagtgcaagagctataccccatgccttgggagagtgagggtgaaaagtacgtcacagaatataagcctggagcccatggcttcaacttgggacttgcatatcacttcagtgcccctgggctttctttcagggatttgctggagggcaggatactaaataaaatatctacttggcaaagatgtttgaggtgcagagtttgtctgggtagtcttacctgactccagcatgctgtatgaccttgaagaaactgaagctcacagagattaattaatcttttcatcaataatatggggaaactataattctgtgtcaagaggccttagtgtcagagctctgaaaaacatatagccctataaaaatacaaacaataagttgtgtattctaaaactatgttggtttgtcttgttgatgagggcctaaagcaaacacataccaactgaggtattaaaacggtcagaagactcttctttgaaaagccctttattaacaatgggaataggaagaagtcagaaccgtgctaggctaatggagggaacaaaagagtttttcattatctagttcaaaggcttttaataaaccccaagatttccaaacaatttgactcctctttgcataagtaaaaggggaggattaagaccaaggtgatggaagagaaacattagccaggtagtagctacaaaattgcaatttttcctcttgctccagtctttctttcagactctgacacagtcacctttgctcaggaatgactttctgtgcaaagttcaatgtatatgtagataaacagcatgacaaaaagtaatgtaaattcaatcaacttgatggtaatattatctcagcaagtctacgcaaacaagtcactccatctgacttgaaactcactttgagagtgaaagactgtttatttagaatccaaaatgctcctgtttaatttttttggcagctcaaggaataattcttttgaataagcacagcctcttctctgcattaaatttgtgaaataggaaagaaaacgtttccaagcagccacgctttcaaagcttaaatgatatttatttccagcccaatgccatgctcaaaattgcgatactaatgccgcattatctccctgttgcaattagaaggtggagaactatgacttccacatatgaaaccaatttcagaggggattaaaacctggcctgctctgaaatttgaacaatgaattaattaccgcactgtagcttcttgagagaaagagcaggcatccaatatcagcaatgctgccatggggttcaatgcactccctgcaaggtacaaagattccagttaggcagaagtgaaaaacaagcaagatcttaccagggcctcaggaggcaagaagcactctgtaacgctgaaactccaggatgggtgttagcatagagctaagattaactacattgattcaaataacaattgaatgtctgctgtatgtcgggaacagggctgagcaatgggtatagagcaggaatcaagccaatcatggcctgcgtgaggctgtctacatcaggtctcaggaagctttttcttcaaagagctagataataaatatttcagctttgcaggctgtatgtgtctagaaaagtctaatcgtataagccaaagataggactgagaaagtttagaggtagttaaaaagagaaagaactttgaaaattcagatgctgattgtaccactctctagctctgaatttgggcagggggcaacagtatgtcagaaccttggattcttcatctgtagagtgggcctaataatgttaatattattgttaatatcaacatgtgatatatcagtacaataacgtagtactactatagcaatattaaccttgcaaggttgttaggacaatctatagtgtgtattgcacatccaatgatgtactatatgctgatatactgatgtatatctcactcctggcacatatagaaggtcaaattttacaaatgatgttactactagtggcaatatgttaaaatagagagcccctccaaaataacattgacccagcagttcagaaataggagttacagcttgaacacaaacctgctgaatgatttcttgcaagacccttcacatctctgtgcctcagccccacataactgagaagttctagttctaactccaggaccagctgcttatatgtatgaccttggtcaaatcaccaaaccatatcgcaatatggtagacaataacagtgacccagcccacccacaagagaggagatcttgagtgagaaagagctttagaaaaaaatgaacaacatttaggcagattttgtcattcacccttctgagctgcatgaccattaggaaagtacagtgaagtcaaccttctcacgaggtcaccgtcctaccaggtgtcctgctcatggttcagtctttctattacccctttgtcagtgacatccctttctattaccactccactgccattcatatttcgcatgccattggtctaagtactactattcccagctgacagatgataaaatgctattcagaaagattaagtagtttgtccaaggtcacacagctagtaagtgacagaattggggattcaaaaccaggcctctctgcctccaaaatctgtacttttaaccatcatagtacaccaagtcctcaattaatgtcctcaataggttcctagaaaatgtgatgttgaattaagcaatgttattccggggcttgccatacatcattttgctttaagttgcagtttctaagaacctattggcaatgttaagtgaagacttactgtccactcccctttaaacaagttagtggaattcccttcaggtcctgaagaatgttagtagcaatagtagtagtagtaacagtggtagctactgctccgaggattagaattctctctcatccttacataaccctgtgtgttataaatgaggcaactgccactccagcagctcccagaggtcccaagcaggagctggtgaccggctgcacatggagccccactcacaaggccatgctctctgcctgcagtgctacgtcaacctgctcttctggtatcagttcttctgtggtttctccagctccaccatgattgattactggcagatgatattcttcaatctcttctttacctccttgcctcctcttgtctttggagtccttgacaaagacatctctgcagaaacactcctggcattgcctgagctatacaagagtggccagaactctgaggtaaggagatcgggcagccaaagggaggtgacttcagcttcttactgacctctacctcccctctggaggcatcagagaaagagctgtatgctggggtcagaagcctgcattctgaccactgttccatcatttactttgagtaactcctctctcctttcctgacccgtttcttacttgctattgagggtgttgggccagactagtgggtatttttaattttttttttattgttattatactttaagttttagggtacatgtacacaatgtacaggttaatttcatatgtatacatgtgccatgctggtgtgctgcacccattaactcgtcatttagcattaggtatatctcctaatgctatccctccctgctccccccaccccacaacagtccccagagtgtgatgttccccttcctgtgtccatgtgttctcattgttcaattcccacctatgagtgagaacatgtggtatttggttttttgtccttgcaatagtttactgagaatgatgatttccaatttcatccatgtccctacaaaagacatgaactcatcattttttatggctgcatagtattccatggtgtatatgtgccacattttcttaatccagtctatcattgttggacatttgggttggttccaagtctttgctattgtgagtagtgccgcaacaacatatgtgtgcatgtgtctttatagcagcatgatttatagtcttttgggtatatacccaggatggctgggtcaaatggtatttctagttctatatccctgaggaatccccacactgacttccacaatggttgaactagtttacagtcccaccaacagtgtaaaagtgttcctatttctccacatcctctccagcatctgttgtttcctgactttttaatgattgccattctaactggtgtgagatggtatctcattgtggttttgatttgcatttctctgatagccagtcatggtgagcattttttcatgttttttggctgcgtaaatgtcttcttttgagaagtatctgttcatgtcctttgcccactttttgatggggttgtttatttttttcttgtaaatttgtttgagttcattgtagattctgaatattagccctttgtcagatgagtaggttgcaaaaattttctcccattttgtaggttgcctgttcactctgatggtagtttcttttgctgtgcagaagctctttagtttaattagatcccatttgtcaattttggcttttgttgccattgcttttggtgttttagacatgaagtccttgtgcatgactatgtcctgaatggtaatgcctaggttttcttctagggtttttatggttttaggtctaacgtttaagtctttaatccatcttgaattaatttttgtataaggtgtaaggaagggatccagtttcagctttctacatatggctagccagttttcccagcaccatttattaaaaagggaatcctttccccattgctagtttttgtcaggtttgtcaaagatcagatagttgtagatatgcagcattatttctgagggctttgttctgttccattgatctatatctctgttttggtaccagtaccatgctgttttggttactgtagccttgtagtatagtttgaggtcaggtagtgtggtgcctccagctttgttcttttggcttaggattgacttggcaatgcgggctcttttttggctccatatgaacttgaaagtagtttttttccaattctgtgaagaaagtcattggtagcttgatggggatggcattgaatctataaattaccttgggcagtatggccattttcacaatattgattcttcctacccatgagcatggaatgttcttccacttctttgtatcctcttttatttcattgagcagtggtttgtagttctctttgaagaggtccttcacgtcccttgtaagttggattcctaggtattttattctctttgaagcaattgtgagtgggagttcattcacgatttggctctctgtttgtctgttattggtgtataggaatgcttgtgattttcgcacattgattttgtatcctgagactttgctgaagttgcttatcagcttaaggagattttgggctgagacaatggggttttctagatatacaatcatgtcatctgcaaacagggacaatttgacttcctcttttcctaattgaataccctttatttccttctcctgcctaatttccctggccagaacttccaacactatgttgaataggagtggtgagagagggcatccctgtcttgtgccagttttcaaagggaatgcttccagtttttgcccattcagtatgatattggctgtgggtttgtcgtagatagctcttattattttgaaatacgtcccatcaatacctaatttattgagagtttttagcatgaagcattgttgaatttcgtcaaaggccttttctgcatctattgggataatcacgtggtttttgtctttggttctgtttatatgctggattacatttattgatatgagtatattgaaccagccttgcatcccagggatgaggccaacttgatcatggtggataagttttttgatgtgctgctgggtttggtttgccagtattttattgaggatttttgcatcaatgttcatcaaggatattggtctaaaattctcttttttggttgtgtctctgcccggctttggtatcaggatgatgctggcctcataaaatgagttagggaggattccctctttttctattgattggaatagtttcagaaggaatggtaccacttccttcttgtacctctggtagaattcggctgtgaatccatctggtcctggactctttttggttggtaagctattgattattgccacaatttcagagcctgttattggtctattcagagattcaacttcttcctggtttagtattgggagggtgtatgtgtcgaggaatttatccatttcttctagattttctagtgtatttgcatagaggtgtttgtagtattttctgatggtagtttgtatttctgtgggatcggtggtgatatcccctttatcattttttattgcatctatttgattcttctctctttttttctttattaatcttgctagcagtctctcaattttgttgatcttttcaaaaaaccagctcctggattcattgattttttgaagggttttttgtgtctctctttccttcagttctgctctgatcttagttatttcttgccttctgctagcttttgaatgtgtttgctcttgcttctctagttcttttaattgtgatgttagggtgtcaattttagatctttcctgctttctcttgtgggcatttagtgctataaatttccctctacacactgctttaaatgtgtcccagagattctggtatgttgtgtctttgttctcattggtttcaaagaacatctttatttctgccttcatttcgttatgtacccagtagtcattcaggagcaggttgttcagtttccatgtagttgagtggttttgagtgagattcttaatcctgagttctagtttgattgcactgtgctctgagagacagtttgctataatttctgttcttttacatttgctgaggagtgctttacttccaactatgtggtcagttttggaataagtgtgatgtggtgctgagaagaatgtatattcttgatttggagtggagagacctgtagatgtctattaggtctgcttggtgcagagctgagttcaattcctggatatccttgttaactttctgtctcattgatctgtctaatgttgacagtagggtgttaaagtctcccactattattgtgcgggagtctaagtctctttgtaggtcactcaggacttgctttatgaatctgggtgctcctgtattgggtgcatatatatttaggatagttagttagctcttcttgttgaattgatccctttaccattatgtaatggccttctttgtctcttttgatctttgttggtttaaagtctgttttatcagagactaggattgcaacccctgcctttttttgttttccatttgcttggtagatcttcctccatccttttattttgaacctatgtgtgtctctgcacatgagatgggtttcctgaatacagcacactgatgggtcttgactctttatccaatttgccagtctgtgtcttttaattggagcatttagtccatttacatttaaagttaatattgttatgtttgaatttgatcctgtcattatgatgttagctggttattttgcttgttagttgatgcagtttcttcctagcctcgatggtctttacaatttggcgtgattttgcagtggctggtactggttgttcctttccatgtttagtgcttccttcaggagctcttttagggcaggcctggtggtgacaaaatctctcagcatttgtctgtctgtaacggattttatttctccttcacttatgaagcttagtttggctggatatgaaattctgagttgaaaattcttttctttaagaatgttgaatattggcccccactctcttctggcttgtggagtttctgctgagagatcagctgttagtctgatgggcttccctttgtgggtaacctgacctttctctctggctgcccttgacattttttccttcatttcaactttggtgaatctgacaattatgtgtcttggagttgctcttctcgaggactatctttgtggcattctctgtatttcctgaatctgaatgttgacctgccttgctagattggggaagttctcctggataatatcctgcagagtgttttccagcttagttccattctttctccccgtcactttcaggtacaccaatcagacgtagatttggtcttttcacatagtcccatatttcttggaggctttgtttgtttctttttattcttttttctctaaacttcccttctcacttcatttcattcatttcaagttgatcacatcggctcctgaggcttctgcattcttcacgtagttctcgagccttggctttcagctccatcagctcctttaagcacttctctgtattagttattctagttctacattcatctaaattttttgcaaagtttttaacttctttgcctttggtttgaatttcctcctgtagctcggagtagtttgattgaagccttccctcaactcgtcaaagtcattctctgtccagctttgttccattgctggtgaggaactacgttcctttggaggaggagaggcgctctgctttttagagtttccagtttttctgctctgttttttccccatctttgtggttttatctacttttggtctttgatgatggtgatgtacagatgggtttttgctgtggatgtcctttctatttgttagttttccttctaacagacaggatcctcagctgcaggtctgttggagtttgctagaggtccaatccagaccctgtttgcctgggtaacagcagcagtggctgcagaacagcagatttttgtgaactgcgaatgctgctgtctgattgttcctctggaagttttgtctcagagaagtacccggccatgtgaggtgtcagtctgcgcctactgagggggtgcctcccagttaggctgctcaggggtcaggggtcacggacccacttgaggaggcagtctgcccattctcagatctccagctgcgtgctgggagaaccactgctctcttcaaagctgtcagacagggacatttaagtctgcagaggttactgctgtctttttgttcatctgtggcctgcccccagaggtggagcctacagaggcaggcaggcctccttgagctgtggtgggctccacccagttcgagcttcccagctgctttatttacctaagcaagcatgggcaatggcaggcgcccctcccccagcctcgctgctgccttgcagtttgatctcagactgctgtgctagcaatcagcgagactccatgggcgtaggaccctccaagccatgtgcaggatataatctcctggtgcgccattttttaagcctgttggaaaagcacagtattagggtgggagtgacccgattttccaggtgccatctgtcacccctttctttgactaggaaggggaactccctgaccccttgtgcttcccgaatgaggcaatgcctcgccctgctttggctcgtgcatggtgcactgcacccactgtcctgtgcccactgtctggcactccctagtgagatgaacccggtacctcagatggaaatgcagaaatcacccgtcttctgtgtcgctcatgctgggagctgtagaccagagctgttcctatttggccatcttggctgccccaattatttcttaattatatcacacattaatatgggactgccctagtcgaaggggaagagccatgcagaaggatcctatacctttcagccatcccctccaggctctgagatgcatctatagaacccccaaagcccagtttgagaacccttgggatttatagctactttgcttttcattgggtaaggtatacaatggttctatttcatattagggaaggcaaaacttagaactcaaaattacatgtgctttagaatttgctggtatcaaatagactaaggcaggcctgagaagccatcaggtggcatcctaggaggcccagagaggccacactgcagccctgaatgatttggagaagtcagacagcatgcactcccagcaccagcaagaagctggatcgagggagctctgggaagagggactttgcaatgccagagagtgtcttgcacctggaggaaagaagggcaaagccaagtgtagtatttgagatctggcaattatttatagactaacagcaagcccagttgttagcccaaagccaagaggagagagcaacacagaaacccaagcagtccagacgaagggggcatggtgagagtgcatgttcaccttgggctcttctaagtttacccttcccatcaaagtgctgactgcatagcaaattccttgagtatctaaaagttaagcaagacccaaaaactgtaaagatttcacttttcctggggaaggcacaaagattaatgcctgagaaggcttgtttctggagccgctgatgcctgagaagccttgtttctggagctgttgaacttcagaaacttgggggaacctgtgattcgagctacgattgagatctctcagatgccacttagaaactttagaatctttacacttgccaggtttgtagcaacagtagcaaaagaactaatgattgataacaatgaataactgagtacttggctaggcactaaggcctgagtacttactaggtaggcacaattgcatttactcctcttgaaccccaaggagataggctgtgttatttttgcccacatttaatggaagaagaaactagttctccgcacagtttagtaattttcacaaggtcacacagttgaactgaagtctgtcacccccaagtctacactcctaattactccattctactaccacaaatacaagaggcattgtatgcgtctggttgtctgtcgcagccacatgcaagaaagttgcttgcaaagaatagaggcttgctataagggtgataattattggtgtgttctctcctggcagtgctataacctgtcgactttctggatttctatggtggatgcattctaccagagcctcatctgtttctttatcccttacctggtaagtcatgtagtcccattctaaccacataaattgcagagaagaactggtcctttttatataaagttccagaccagtagtgtccttctggacactttagagcagaggctcaaacaggtagcctgcaggttacatccaacccaaggtgtttgaaaagtcagaacactacccaaacattttgatttctgctggctcttgaaaaactgaaagctatatttatactgggtcattttttccctcatagcaaaaatctggacttgactttgcagctgggctcaccttgtgagcatgttctccagtttgccttagtctctaccactcccctttgtcttacatctggctatctttactcattaactgtttcctacttgaacactgaaggtatttgaatttactacccttgatttttatatacacttgtgctttgaaggtcaaggaagctagccttcagaggcagcaagttccgataatgagatactacattatctgaaaaaaagtagcaagaatgcagatagcaagggataccagcccaatctcagtttgattcctcagtttaaatagtgagaatttaggtagcaaacaatatatgtcttcttcctggacacacggaacaggatgggaagcaattgccaccaggtaaacactgttgcttatccaacctctgggctcatattctttcataattagcaagatgatggagttaggggaggcagggatcttgtgttttgcttgaacttcctggcttacaataccctccctggccaggtctttgcttggctttcctgctatatcttttgcccttgaatatgctcaacagacctacaatgtaggactctggagttctacaaaccgtctgtgttcaccctccgttctgaccttttctggaactgcatttaccctctctttccaagtgattaactcctcttattctggtctcagctaatatatcctcttctgtgttcccagggtaccttgtacttgcctctattatagcacgtacttccttaaattgtaccacatccgcactgcctaatagactaaactcattgtaggcaaacacagaagtatcctcagctgttagcattgtgtctgatgggctctcaatgaattctgtcttcattcattccacaatggtttcacaatccccatcttggcttactcctgcaaacaccatttctaaattagtcctatcaattcctttcttaccttgacctgttcctcggatcagtaccacacagatggcagctgggtacctccttctccattgacaactgccttcattgatgctttataatcactgtgtcaaagccaaagttagtccacagacatacctgacaatgcctgtctgttcctcctctgcaggcctataagggctctgatatagatgtctttacctttgggacaccaatcaacaccatctccctcaccacaatccttttgcaccaggcaatggaaatgaagacatgggtaagtgtcccagagcccctttggcttcaaaactgtgctcctgcccattgactatactcaaatttctgaattgtttcattctgtgttatcaatccactcaataaatacatactaagctcctaccctatgtcctacctgtacagggatgaaaggggtgaaaaagataaaattctggaatcaacttgcttttcatctagccaggatgttaaaactaacatatattaaaacaatgagacaattagttgcaaaaatagataattgataaaaagttcaggggtatggccaggcatggtggctcacacctgtaatcccagcactttgggaggccgaggtggacagatcacctgaggtcaggaattcgagaccagcctggccaagatggtgaaatcccgtctctactaaaaataaaaaaattagttgggtgtggtagcaggcgcctgtggtcacagctactcgggaggctgaggcaggaaaattgcttgaacatgggaggcggaggttgcactgagccaagatcatgccaccacactccagcctgggtgacagagtgagactccatctcaaaaaacaaaaaacaaaaacagttcaggcgtgtttcagagacaaggaaaacactgaccatacatacctgaggctgtgttagggaggaattctccccatttaattttagggtgaatgattagaaacgtgcctccaggtaaccatatctcaagcatatccaaatgtcacattttgatatctaagaaggcaatgtcacctttctgattagatttttctagtcagtaataactataaaaactaatagcttacaattctgtctataccaagtgtctctctacatgattagcgtgtattatttaacctctagagccctttgtgttaggtgtttttatattcccattttacagatttagaaatatggcagatgcaataaggtttaacttgcccccaagcagtttaagatagaagcaagttttgaaccctggcagtttaacgtgagcctttaacatccatgctaatagtgtaagtagataagattgaatggtacacagggaacactttacagaaagatgtgtccttagccaagttcagatggctttctggaagtacaagcattaaaaatttggaaaatagccccaagtaggctcagcatgttcctacattctgcaatggaactctccaccccagcctcccaccaccactatcacaagctaaagcaggccataaccagctgggcagtggctgataagagccactcaaaggtagttttggatcatggagttctcattttgaaaaccccctctcctattcaacatagtattgaagttctggccagggcaatcaagcacgagaaagaaataaagggtattcaaatagaaagagagaaagtaaaattgtctgtttacagatgacatgattgtatatttagaaaaccccattgtcagggcaggtgcggcggctcacacctgtaatcctagtgctttgggaggctgaggtgggcagatcacaaggtgagaagttcaagaccagcctggccaacatggtgaaaccccatctctactaaaaatacaaaaattagctaggcatgatggcatgtgcccgtaatcccagctactcaggagctcaggaggctgaagcagaattgcttaaactgagacctgggagacagaggttgcagtgagccgagatcatgccattgcactccagcctgggctatggagcaggactccatctcaaaagaaaaaataaaagattatctaagcccaaaaactccttaagctgatgagcaacttcagcaaagtcttaggatagaaaatcaatgtacaaaaatcataagcattcctatacaccaacaatagacaaacagagcaccaaatcatgaatgtacttccaatcacaattgctacaaagagaataaaatacctaggaatacagctaacaatggaagtgaaggacctcttaaaggagaactacaaaccactggtcaaggaaataaaagaggacacaaacaaatggaaaaacattccatgctcatggataggaagaatcaatattgtgaaaatggccatactgcccaaagtaatttatagaatcaatgctattcccaaactaccatcaacattattcacagaattagaaaaatctactttaaatttcatatgaaaccaaaaatgagctcatatacccaagaaaatcctaagtaaaaagaacaaaactggaggcatcatgctacctgacttcaaactatactacaaggctacaataaccaacacagacatatacaccaatggaacagagcagagacctcaaataacaccacacacctacaaccatctgatcttcaacaaaccagacaaaaactagcaatggggaaaagattccctatttaataaatggtactgggaaaactggttagccatatgcaggatcccttccttacaccttatacaaaattaacaccttatacaaaaattaactcaagatggattaaagacttaaacataagacccaaaaccataaaagccctagaagaaaacctaggcaataccattcaggacataggcacaggcaaagatttcatgacgaaaacaccaaaagcaattgcaacaaaaatgaaaatttactaaactaaagagcttctgcacatcaaaagaaagtatcatcagagtgaaaaggcaatctacagaatgggagaaaatttttgtaatctaaccatctgacaaagggctaatatctagaatctacaaggaacttacacaaatttacaagaaaaacaccatcaaaaagtgggcaaaggatatgaacacatacttctcaaaagatgacatttatgtgaccaacaaacatgaaaaaaagctcaacatcactgatcattagagaaatgcaaatcaaaaccataatgagataccatctcacgccagtcagaatgacgattattaaaaagtgaagaaacagtagatggcgaggcagtggagaaataggaacgcttttacactgttggtgggaatgtaaattagttcaaccattgtggaagacagtgtggttattcctcaaggatctagaaccagaaataccatttgacccagcaatcccattactggggatgtacccaaagcattataattcattctactataaagacacatgcatacaaacatttattgcagcactatttacaatagcaaagacatggaaccaacccaaatacccaatgacagattggataaagaaaatgtggtacacacacacactatagaatactatgcagccataaaaaagaatgaggtcatgtcttttgcagggacatagatgaagctggaagccattatcctcagcaaactaacacaggaacagaaaaccaaacaccacatgttctcactgataagtgggagttcaacaatgagaacacatggacacagggaggggaacaacacacactggggactgtcaggaggtggggaacaagcggagggagagcattaggacaaatacctaatgcatgcagggcttaaaacctagatgacaggttgatagatgcagcaaaccaccatggcacatgtatacctatgtaacaaacttgcacgttctgtacatgtatcccggaacttaaagtaaaataaaaattttttaaaatcctgctccaatgtgtaccaatgacagaacaaagtgataagacaaaaaaaggcatagccaggcttaagtacaggacaaatttcttcatgggccagaaacaccagaagaggctgcaatacaatgaggaagggaagaagaagagaaggcactgggaaggctcaaactgcagactttctgggaactgggacaggacacagatcatggcaatggggactctggctcctgcggggtagggcagactggaaccccatctactgctgggtctaaaattctcctactcaagaaagaaatctaaagaaaagataacaatggcaagctgtttggaggtatagtttttggttttttgtttgttttttggagatgaagtctcgctctgtcatccaggccagagtgcagtggcgccatcttggctcattgcacctccgcctcctgggttcaaaagattcttctgcctcagcctcctcagtagctgggactatggcgcgtgccaccatgcccagctaattttttgtaattttagtagagacagggtttcaatatgttagccaagatggtctcaatctcctgacctcgtgatccgcccgtctcagcctcccaagaaggtatagttttatcagaagctgtttgatactagaaaccaccaagctaatgaattcttgaaaataaaatattgtcattgaaattaaaactacaatttgtaggatctgctctagatcagacactggcaaaaaataaactgccaaattgaaatgtagttttgggagcttatccagaatgatacacaaatatgaaaaataagaggaaatggtggctagaacaaatggcttcagcctctctaaataggaatatcaggaggaaaaaagaatgatggagaagcaatatttgaagaaattgtcattgagaatgaaaatttatcaaaaatctggatgtattgcctggatatatcataattaaattgtataatataaaacatacagaggcagcccttaagtctgccagagactatagacaaattacttgaaaaggaacagctatgctggtgaccaaacaataaaagccaggagacaatggagtaattgtcttcaaaaaacctgaaggagaaaataaaactagaaaagctacactattaagagtaaggcaagataaatcctattttcaaataaactctataaggttaactacccataggccctcacaaaaaaaggaacatacttctgcaagaatgtaaacaaaagctaaaactataagacacaacataaagaagggctattcaataggtaggtaatttatgctaaagccttcatagtggatagaagaataaaaatacacatttaactatacatttttccataagagttcagtttttttagtatcttaagattaatcactaaaagggaaaaagaaaaaaatctagaaaactgtcaattctgcagatgtaggaaagatgaaaaaatgagagcaggggtggctggcgagatggccaaataggaacagctccagcctgcagttcctagcaagatcaacacagaaggtgggtgatttccgcatttccaactgaggtacccagctcatctcactgggagtgcttagacagtggttgcagcccacagagagcgagccaaagtagggtggggcattgcctcacccggaaagcacaaggggttggggaactgcctgccctagccaagggaagccatgaggagccatgaggaacagtctactctggcccagatactacacttttcccacagtcttcccaatccacagaccaggagattctctcgggtgcctacaccacgagggccctgggtttcaatcacaaagctgggtggccgtttgggcagacatggagatagctgcaggagttttgttttttttttccataccccagtggtgcctggaatgccaaagagatagaactgttcactcccctggaaagggggctgaagccagggagccaagtggtctagttcagcagatcccacccccatggagcccagtaagctaagatccactggcttgaaattctcactgcgagcacagcagtctgaagttgacctggtacactccagcttggttgggagaggggtgtccaccattactgaggcttcagtaggtggtattcccctcacagtgtaaacaaagccaccaggaaattcgaactggacagagcccactgcagcacttcatagcttctgtagccagactgcctgtctagattcctcctctctgggtggggcatctctgcaagaaaagcagcaactccagtcagaggcttatagataaaactcccctctccctgggacagagcacctcggggtaggggtggctgtaggcacagcttcagcagacttaaacgttcctgacggccagctctgaagcacagcgctcgagctctgctaagggacagactgtctcctccagtgggtccctgacccctgtgcttcctgattgggagacacctcatacaggaaagttctggctggcatctggtgggtgcccctctgggatgaagcttccagaagaaggaacaggcagcaatctttgctgttctgcagcctctgctggtgatatccaggcaaacagggtctggagtggacctccagcaaactccagcagacaggcctgactgttagaaggaaactaacaaacagaaaggaatagcatcaacatcaacaaaaaaaagcccatacagaaaccccatctgaagttcactaacatcaaagacccgaaggtagataaatccatgaagatgagaaaaaaacagcacaaaaaggctgaaaattccaaaaaccagaatgccacttctcctccaaaagatcacaactcctcaccagcaagggaacaaaactggatggagaatgagtttgatgaattgacagaagtaggcttcagaaggtgggtaataacaaacacctccaagctaaaggagcatgttctaatgcaatgcaaggaagctaagaaccttgaaaaaagattagagggatggctaactaaaacaaccagtttagagaagaacataaatgacctaatggagctgacaaacacagtatgggaactttgtgaagcatacacaagtatcaatagctgaatcgatcaagtggaagaaaggatatcagagattgaagataaacttaatgagaaagcttgaagacaagattagagaaaaaagaatggaaaggaatgaacaaagcctccaagaaatatggaactatgtgaaaagaccaaacctatatttgattggtgtacctgaaagtgatggggagaatggaaccaacttggaaaacactcttcaggatgttatccaggagaacttctccaacctagcaagacaggccaagacacataattgtcagattcaccaaggttgaaatgaaggaaaaaatactaagggcaaccagagagaaaggtcgggttccccacaaagagaagtccatcagactaacagcagatatctctgtaaaaatcctacaagccaggagagagtgaggaccaatattcaacattcttaaagaattttcaacccagaatttcatatccagccaaactaagcttcataagcaaaggagaaataaaatcctttacgacaagcaaatgatgagagattttgtcaccaccaggcctaccttacaagagctcctgaaggaagcactaagtatggaaaggaaaaatcagtagcagccactgcaaaaacataccaaattataaagaccattgacactatgaagaaactgcatcaactaatgggcaaaataaccagttaacatcatgacaggatcaaattcacacataacaatattaaccttaaatgtaagtgggctaaatgctccaattaaaagacacagactggcaaattggataaagagtcaagacccattggtgtgctgtattctggacacccatgtcacatatgcaaagacacacataggctcaaaataaagggatggaggaatacttaccaagcaaatggaaaacaaaaaaaagcagggttgcaatcctagtctctgataaaacagactttaaaccaacaaagatcaaaaaagacaaagaagggcattacataatggtaaagggatcaatgcaacaggaagggctaactatcctaaatatatatgcaccaaatacagggcacccagattcataaatcaagttcttagagacctacaaagagacttagactcccatacaataataatgggaggctttaataccccactgtcaatagtagacagatcaacaagacagaatattaacaaggatattcaggacttgaactcagctctggactaagcagacctaatagacatctacagaactctacaccccaaatcaacagaatatacattcttctcagcaccacatcacacttattctaaaattgaccacataattggaagtaaaacactcgtcagcaaatacaaaagaatggaaatcataacaaacagtctctcagaccacagcacaatcaaattagaactcggcattaagaaactcacttgaaactgaacaactacatggaaactgaacaacctgctcctgaatgaccactgggtaaataatgaaattaaggcagaaataaagaagttctttgaaaccagtgagaacgaagacacaatgtaccagaatctctggacacagctaaagcagtgtttagagggacgtttatagcactaaatgcccagaggagaaagtgggaaagatctaaaatcaacaccctaacatcacaattaaaagaactagagaagcaagagcaaacaaattcaaaagctagcagaagacaagaaataactaagatcagagcagaactgaaggagatagaaacacaaaaaacccttcaaaaacaaaaaatcaatgaatccaggaactagtgttttgaaaagattaacaaaatagaccactagccagactaatgagagaaaaatcaaatagacagaataaaaaatgataaagaggatatcaccactgatcccacagaaatacaaactaccatcagagaatactataaacacctctacacaaatgtactggaaaatcaagaagaaatggataaattcctggacacatacactctcccaagactaaaccaggaagaagtcaaacccctgaacagaccaataacaagttctgaaattgaggcagtaattaatagcctaccaaccaaagaaagcccaggaccagacggattcacagccgaattctaccagaggtacaaagaggagctgatatcatttcttctgaaactattccaaacaataaaaaaagagggactcctccctaactcattttatgaagccagcatcatcctgatacaaaaacctggcaaagacacaacaaaagaaaatttcaggccaatatccctgttaaacattgatgcaaaaatcctaaataaaatactggcaaaccaaatccagcagcacatcaaaaagcttatccacccacaatcaagtcagcttcatccctgggatgcaaggctggttcaacatacataaacaataaatgtaatccatcacataaacagaaccaatgacaaacaccacacaattacctcaatagatgcagaaaaggccttcgataaaattcacctcttaatgctaaaaactctcaataaattaggtattgatggaacgtatctcaaaataataagagctatttatgacaaacccatagccaatatcatactgaatgggcaaaagctggaaacattccccttgaaaaccgacagaaaacaaggatgccaccctctctcaccactcctattcaacatagtatcggaagttctggccagggcaatcaggcaagagaaagaaataaagggtattcaaataggagaagaggaagtcaaattgtctctgtttgcagataacatgattgtatatctagaaaaccccattgtctcagccccaaatcttaagctgataagcaacttcagcaaagtcttgggatacaaaatcaatgtacaaaaatcacaagcattcctatacaccaataatagacaaacagccaaatcatgagtgaactctcccattcacaattgctacaaagacaataaaatacctaggaatacagctaacaagggaagtgaaagacatcttcaaggagaactagaaaccactggtcaaagaaataagagaggacacaaacaaatgcaaaaacattccatgctcatggataggaagaatcaatattgtgaaaatggccatactgcccaaattaatttatagattcaatgctatccccatcaagctaccactgactttctccacagaactggaaaaatctactttaaatttcatatggaaccaaaacaacccatatagacaagacaatgctaagcaaaaaacacaaagctggaggcctcatgctgcttgacttcaaactatgctacaaggctacagtaaccaaaacagcatggtactggtaccaaaacagatatataaaccaacagaacagaacagaggcctcagaaatcacatcacacatctacaaccatctgatctttgacaactctgacagaaacaagcaatggggaaaggattccctatttaataaatggtgttgggaaaactggctagccatatgcagaaaacaaactggaccccttccttacaccttatacaaaaattcactcaagatggattaatgacttaaatgtaagacctaaaaccataaaaaccctagaagaaaacctaggcaataccattcaggacataggcatgggcaaagacttcatgactaaaacaccaaaagcaatggcaacaagagccaaaattgaaaatgggatctaattaaagagcttctgcacagcaaaagaaactattatcagaatgaacaggcaacctacaggatggcagaaaatttttgcaatctatccatctgacaaagggctaatatccacaatctacaaggaacttaaatttacaagaaaaagcaatcccatcaaaaagtacacaaaggacatgaacagatacttctcaaaagaagacatttatgtggccaacaaacatatgaaaaaagctcatcatcactggtcattagagaaatgcaaatcaaaaccacaatgaaataccatctcactccagttagaatggcgatcattaaaacgtcaggaaacaacagatgatggagaggatgtggagaaaacttttacactgttggtgggagtgtaaattagttcaaccattgtggaagacagtgtggcgattcctcaaggatctagaaccagaaataccatttgatccagccatcccattactgggtatatacccaaagcattataaatcattctactataaagacacatgcacacacgtttattgcagctctgttcacaatagcaaagacttggaaccaacccaaatgcccaccaatgatagactggataaagaaaatgtggcatatatatatataccatggaatactatgcaaccataaaaaaaggatgagttgtcctttgaagggacatggatgaagctggaaaccatcattctcaggaaactaacacaggaacagaaaaccaaaaatactgcatgttctcactcataagtgagagttgaacaatgagaacacatggacacagggagggcaacatcacacacttgggcctgtcagatggtgctaggggagggatagcattaggagaaatacctaatgtagatggtttgatggatgcagcaaaccaccatggcacgtgtatgcctacgtaacaaacctgcacattctgcacatgtagcccagaacttaaagtataatgaaaaaatgcattttaattttaaaaataaaatgagagcaaagaaaatgatggcaaacaaaaaatgcaaaatgagatgtttaactaaattgaaatatatcagtactcatagttgatgcaagtagattaaattcttcctttaaaaaaattacagactggatttttttcatccagcaaaaataagaaatggacaaattcacaatcatagtttgatattttcatacaactatataagaaactggtatagatcaaatagatgaaaaaatagaaggggtatagaaacttttaataaattgtttgacctaatatataaaactttgctcaaaacagataacattttttcaaacatacacaaaccagttaccagagagacaattctaaatcacaaaggaatttgaaagaaaaaaaaaatcataaagtttatgttctctgacaagttatttaaattagaaaccagcaataaacaggtagccacataaaacctaacaaacttagaaatttcaaaatgtacttctaaacaacttatgaaataaagagtaagtcatgatggaaattctaaataccttttgctcaatgtctataaaaatactagcacttttaatggcaaaatccacgattacttatgtaccaacctaaggattagaaatcccctaggacgcggtgctctccagccccagaaaatcaataatgatctgtcttaagtaggagcagtaattcctttaccttcagcagtgattggtccagggtgggcacatgatccagctcttagccaatgagaggtcaagggatacctgtttttttaattattattatcaataagatagagtcatgaggtaaaagccttttgtcccaccttttccttcctgcttttgtcagtgccctgtgaccaaatgatgtgtggcactgcagccactgttttgggcaatgagtttaaggacaaagccaactactgctagagatcccagagcagaaagatgaaaagagcctggattcttggacacactgagcccctggctgccaaccttaagatgttttgctataaaagatgatatttcttctttgattaagctgctgtcaggcacactgtcacttgcagttgaaaatgtaacaaatgccatcacattcccaatgccatattcctcagattaccttcagagaaggaagctaaagctagcaaacccttgaaggtacagggatcagcattccagctgaggtgtttggacttttcctgggagggaaatgtgttcagaagatcctcctatctccaatgtgccaacatctacctatgatacttacctctcctttgcttcacatcctaccatggttccccattgctcttaggacagagtccaaactcctcacttacgaacctgtaatatctgggtcctgctggccccctggcatcaccagtgatgcttcctacttcatacttagaccccagccagaccaagctacttttagttctcaaataccctattcttgcttctaggcctctgcatttgctaatttctctcccatttcctctggctctcttctcatccttcaggcctcatctcaaatgttgtctcctccaagaggccttccttggtgtctaggctggattctgtaaccccttggggctcccattgtgtcttgtgatttctcttattaaacacttactgaactggattgtgattgttttcataattgctctgcactatgctgcttccagctccctttcctaacttctggccctgattaccaaatgtgagcttaggctcatggccagattcttggctgtagactcaaagataactgcttcccatagacccctccatcacttttttgcagtcacgtctgtagttggatgtgcttggtttctcaatttggtgacttttatcctttaagtccttttctgggcttcactttctcactcctctcacaattatgggaggtctagtccctgtagtaaatctcttatcctagacactcacagtaactcttctcccctgactgatacacaatccagagcagacactgtctcctggttttggagatggagacatgacccagaaccccatccaaacaattctacccgaccccattcacagtgattggttcaggcatgtacatatgacccagtcctggccaatgagatcctgccttaggatttttgttggaaagcaggagcagtctttccgctgtggttgctgagccagttgtttggaagcctggagcaactggcaatttcttgccgtaatgtagaaaggactactggagaatgagaccaacagagaggaaagcaggatgaagaaagggagaggtgcagattccatgggacattgctgagtgcctgcatccagctttgcctgaagctaatcctacctctaggcttattatagctcaattcagtcatagttggttttttgtaccatctagtcaaaagagcctggccaatgtgtgaacaataactatctgttaaataaatgaatctcaaattgactgtggctatttaggggtttttttttatttgtttaatccattgttttctttttagaagaaaaaaagaatttagtgggttgttgttatatgaaaaatgaatcctagatagaatcctaggaggggattttaatcatcatttaatccagtgctttttttaattacagatatggaaattgaggctcaaagagggtatctgaattgccaggatcacatggccaggtagagaatgtataatctgaatatgctcataaggaaacatcagacaaatacaaaatgagcattattctttctttaaacaaaaaggtggtaggtagggtgagagtattccagtatttttcaaaaatgtcactgccataaaaaaccaaaggctacgaaatagcccagattaaaggagactaaggagacatgaaaactaaatgtaatatttgaccctaaactggattctgtgctgaagggaaaaaaaacacaccattaggacattattggatcaattaacaaaatatgaatgtaaaaaaattttagctatgttaaattaattttagcaatgttaagtttggtaaaatttaccaaaatccagtcaagatcactcagcaagcctgaataagccaaatcctatccccaaaaacattagacccaaaggatttaaagtttgatcaaacttgtaaagaacagttaatctctattatatcaattttttcatggaataaaaaaatagaaaaagataagtgtcttagtcagtttatgctattgcaacagaacacctgagactgggtaatttacaaagaatagaaatatatttctcatagctctaggggctgataagtctaagaccaaagcaccagcaggttcagagtctggtgagcactgctccctgcttcaaatggtgtcctcttgctgcatctttgggaagggcacaaaaaaaaaaaaaagatgaatgctgtgtcctcacaaggcaaaaagagatgaaacaaacactgtgtcctcacatggtgaaagggcaaaaaaagcactaggatgcttccatcatcctcttttataagggcatctaattcattcatgaaggaagatctttcatgacttaatcacttccaaaaggcccctcctcttaatactatcacagtgggtattaggttccaacatatgagtttagagggggcacatacatttaaaccacagcaataagcaatttgtttttcatggctataataactgatatcaaaatgggcatgggcagttcaaggaaagaaaattacagaccaatctcactaacattagatgtagaaaaaaaattttttttgagatagaatctcactcttgtcacccaggcttcagtgcagtggcgcaatctgggctcactgcaacctccgcctccgggttcaagtgattctcctgcctcaccctcccaagcagctgggattatacacacacaccaccaagcccagctaatattttgtatttgtagtagagacaaggtttcatcatgtttcccaggcttgtcttgaactcctcctgacctcaagtgatccacccaccatggcctcccaaagtgctgggattacaggcgtgagccaccgcacccagccagatgtagaaaattctaaataaaatagggacaagtcattttgggagtgtgttaaagatgttaaagcataaccaaggaacttccctatcctgttagtagatcataaactctgaagagttatttgaaaacagctagaggaatgtaaagtactcatttttttggcacaattctaagtacatacctcagaaacactcttgcacacatatatgtggagacatgtacaggaatgttacatcgttcttaatagccaaaagggggcctaaatattcatcgatcagaaaaataagttgcggcctgttcataccatgtaatagttaaaatgaacctactagagctatgtctttcaacatagataaaattttaaagcagtggtccccaacctttttggcaccagggaccacagaagacaatttttccatagaattgaggggtggaggtggtttggaatgaaactgttccacctcagatcatcaggcatttgagtctcataaggagcatgcaacctagatccctcacatccacagttcacaatagagttctcgtgctcctatgagaatctaatgtcaccactaatctgacaggagttggagctcaggcagtaatgctcactcaccagccactcatctcctgctgtgcagcccagttcctaatgggctatggactggtactagtccatggcccaggagctggggacccctcttctttaaagtataaaagcaagcgaaaaaagctgcagaattgtctgcgtcttctcaggctgtcataacaaataccatagactgggtggcttaaataacagattcatttctcatggttctggaggctagaagcccaagatcagtgcagcagctgattcagcatctggttcaggccctcttccttcctggacagctgccttccagctatattatcactcacatggctgaatgaaagagagaaggatcaaatctctcatgtcttttcttataagggcactaatcacattcatgggggctccccctaatcaccttcaaaaggccccacatcaaaatgctatcacattggagattagggtttaaacattactaacttgggagtaggaggacataaacattcagcccatactagaaggatacatatatgataaagcaaaaaagcatccataaacatgggtaaacatgtacacgtgtatgaaacgtgtcagactgatacacactgaatttgtgttcaagatgaaagaggtcatttgcaagagatatacacttgctttaattgtatctgtaagacttaatctttccataaaatctgaagtaaatataaggttaaaaccgatgaagctgaatgttgggtgtatgaggtttattgtctataagcatgaaatatttcacagcaatttaattacacttttaaaaactagtccaagatattttccaaaaggaattctcctctctatgactctcttaatcattagattttttaaaaccattcaaaagatttaatgtcctgaaagatttttaatcagaactcaacattatattaaatgagtggtgagactaaagattctgtattctgattgaacactcagtcctctttctcaaagcactgaagccatctgctttaaaagagaaaaagtactcttttagcactattaagccacctaatctatcttcagactaggtaccctcaatagttactggtgatttctggtgatttggggaaaggagtcagctactaaaataattatgaaaaataatgcttcccttttgaaagtacttgaagcaggaagagaatctatttcttccctggatagaaatataacaagaattttaagagctttgacagtttcagtccccattaaagcaattgaaaaagttagctaattgctttcttcttcaggaaacggcgctaggttatttagatcacatccctcactgagaacaacaaaaaatactggataactttaaaaaaggggaaaaaaaaactctttaaaagcatgagcaagctgacaagaaagcaatgaccaaacctcagggaaaaggagatgctagagaaacaaattgagccaatgcttttcttaagggtattggcaactatcccaaaaatgaacttttgttttggcagacttgattgagcaaaagtttcagaaatcaatacctaggctcctaagttaggagtctaagagacaacattaaaataggatcccaaaggctgtgacttcaaggtaaggatatactcagaagtacacccaattatactccctccccagctgggactgcaaagatttttttcctctgtgctgaagagagcagaaagaaatcagcaccaatttgccctggggaaattgtgaccacagactggcctcaggtacatatgtagcccaggttcatgttacctgggtgagccaaactttcacctatgaattgagcttaaagtacctcaagattagcagtgcccaacgattgcaaaatacaaacacacacacacatgcatatgcagatgtacacaattcttttctagagaaagttacctttattctaagcctcaagttgtgtctaacttttagcacaataagcatattcaaaaataatgaacctcataaaagaatgagtccatgagtgaaaaaccaaatatcagaaacaaatattttagaaactggaattatcaaatataaattaaaggaaaatctatgtttactatgtctaaagaaacaaagaataagctttaaaatatctgcagggattggtaaactatataaagcaacctagcagatttgaaaaatcaatagaaaatttagaaataaagactacaataactataagtttcaatggttggcttaatagaaaattagatatagctaagggaagaattattgaattggtcaaaagaagtatttggactataaaacaggaaaagtaatgaaaattatagaagcaatattaagaaaatagaatgatattttaagtggtctgacaaacatttaatcagagtctcagaaagaaatgagagagggaatgaaatataggcaatctttgaaaagactgtgatgagaattttgcagaagtgatgaaagattccagctcagcaaaacccaagcaagataaataaaaagaaattcatacttactctgtcatagaaaactatagatcaaaaagacaaaaaaaagttataaaagcaagcaggctttaagagataaagatttccttctaaggaagaacaagtggagattaataacttcttaatagcaataatggaagccagaagacagtggaatgccatattaaacacattgaaggaaaatagctgcctaacaagaattccatattcatcaaaagacaaatttcaagaacaatgaaataaagcatcagagagcatatcactgtcagactcccaaaaaggacattttacaggatgcacttaaaaagatacctcgggtggagggtccaaggaatggaggcgtgagaagtgataaacatgtgagtagatcttagtgaatactgaccatacaaacaataatgccagtgagttgagtgattttaaaagatgacagaattaaaacagcagcaaaacatattagccaggagggatgtaaagagagttaaagtgctctaaatctcgtgtgtaattcaggaggatggaaaactagttgtaagctttagactgcagtaagtttgcttgtttagactgcagtacatttgcttgtttagactgcagtatatttgcttgtttagacttattgagtaatcactaaaagaatagtcccaaaattatacaaaatagtcaatatgtttaaaagaacaatagaatgactatagttaacattagccgattgtgtatttcaaaatagctagaagagaatcatttgaatattcctagaataaagaaaatatttaaagtcatggatgtcatgattaccctaattatatatgaatataccaaattattacatgtaccctgaaaatatatacatctagtatcaatttttaaaattaaataaaaataaaagacaaggatgggaaaagaaaagcacaaaacaggcaggacaaaatacgatcaaaaaacagaatactgcgctgctttgaaaatgaataaactactgccatgtggaaaaaatgggctcatcacacaaacataatattgagggaaaaaaaacaaaaagtcatacgaaacatgattctatttatccatttaaaaacaggctatgttggaaaacctagataggtggtaaacctacaaaggatagcatagaaattatcaccaaaagcaggggtgagacagaatagggtcttctggggtatgtgtgttcaattctacatggcagcaatctggtgtttgctttataatgatagattaagctgcacacttttttgaattttgtgtgttttgcatttcaaaaatagtttgaaacaaagttaatcaagtagtttgatcaccctgcctcctaatctcagctataccttcaacagtgtttgcttatttccctccacagaccattttccacggagtcgtgctcctcggcagcttcctgatgtactttctggtatccctcctgtacaatgccacctgcgtcatctgcaacagccccaccaatccctattgggtgatggaaggccagctctcaaaccccactttctacctcgtctgctttctcacaccagttgttgctcttctcccaaggtttgagcactagggctgtgtttctttcctaaaattaccaatctccctttaataagccatttttataacccaagagtcaggagtttgacttctgctggcatccttgaggctaatgtttcagaaacagagagatgggacagaaagaacaatgaatgacaaaggaggcaaataacatggactgtggtcccaggttagccacaaagtagcaaagtcaccaaatcagtgtgacctcagttgtgacatctataaaatgggagtatcaattcctaccctcctgccttacaaattttttgtgtagtaaggaattattttgagaagctctatggtcctttattgtattagtccaggaatcttatactcaaatgcctacagggacaggccagcaagttcagcaagccagatggagtacagatattggaagaaagagcttctcagcttctatcatggccacaaggaaagatcaagtcaaacattccagagcttcagcattttcccagaaattcaaattgtgcatgaaattgccagtgtttaaatactattcaaatttgtttaaacacacaccttccatacaagacctgcattagacaaataatccatgcccagggactatgtcagatatttccaggttaaaccctctgcagtaaatgtgccttttccagaaaaatagcaacagcaactataaatgccttgccttgccttgccttggagctcactcttgacataggctctcccatctagcctctcattttgtttttgccatgagctaagtgttgggcagagctatggttctagtaccccactcatgggacagctgaagtaccaagagggaccagaatgtgttcacaggcctaccacagatcatagtcagagctaggttctcccaactcaaaggccagtgttctattccgcagcccactctctctagtcagagcagtgaacttgatgatgatgttcccataggaaagacttagcctctctccatctcaccacgctgaacatcgcaatcaagccattttatcattttaagcgatagcaaatagacaattatacaaaactttttatcccaaaattagagacctatcaacaggccttacttcctttaataagtttggtggtttgcttaacctagtttctcttgtccctaggttctcttgcccctaggttctcttctaactttatgttctctccataaaaagcaatcactatcatggatttaaaaatttttagcagacgactcttcaccataaattccccccagacctctcttatgaattccagacacatctttctagctacctattcatcacctctactgggcatattaagtctgaggaaactgggagacatttctaattgaattcatcattccaccctctatcaccggcaccaccccagaaatctgggtatctctagagtttctttcagcaaatgctacccacttgggacaaaggcaggccccagggaattaatcttgacatcacctgctaactcatgcccatatctagcctttcaccaagtactgacagttctatccactacgtatttctcaaacccatctactatttccatttctacagccactactaccaatagactattaccctttcaccccaaattatttcggtagtctcctattggatcttactctagtccattatcattggctcaaagtgtgatgtcacctatttataaccctccaagggcttcccaagacctctgcaataaagcacaaaaaccataaacctggcccccaattcctccctgctctgcttgggccaactcctcctaggacatattcccctactcttatcactccccaagcttcagccatcatgcctaggttttgattctcatccctttggcatggctacctcctatgcatcctgcagttttcagctttaaaaggttactgtgtgtaaacctttcccccaagccactaccttcctcctccattcatttattcaacaaatacttttcaaatccccacaatgggccaggcccccaaaggattaagccatgaacacaagagacaagatttttgctgtcatttaacatgtgactatagttataaatggagggggcatttcctcaaggaagaaacatttaagggcgtggatttgagaaatacatggccggtggaactgtcagcacttccttccttgaggaagaaatatttaatttcagtgatcaggtgtttgatgttcgacactctcattgccttctccatttataactatattcacatgttacgtgacagcaaggaccttgtctttcctattcatggcttaatcccttggggacctggcccattgtgggaaattgaaaagcatttgttgaataaatgaatagaggaggaaggcagtggcttgaggaaaaggtttatactaaggaaattccagttttgaagcaaaaagtcaaatatttcctgggacacatacatggcccctactacctcactgggtgagatgtgagagaacaaaaaaagtttatctggttccatgagatccactgtaattttcagaaatctcttgcccactggcaggggttggccaggggtagaggggtcaccttgcagcttttagacatagtggaagaatagaagccttcctgcttataagacttcaaacataaaaaatatttaaagactatctttgggaatgaccttagatgtcctccaggtcagatagattacttttttacttttcagataaggcaacagacatctggaaagtggatgtgagttgcccactgccacggcttgtgtatattttctccatacaccgcatagttatattcacattctcacccctttccttgcctacactttgaacagagagaagattctagacacagataaagacttccaattccagagtctactacagactgcatgcagcttggcagggggataaaatccttgagtcagtcaacagggagatccgttaacgtctcaggagaccttaggaatctcacctcacctcttggggcccctatttctttatctggcaaatcatagtaatatgatgacactgtcaagtacagcaaggcccacagattcaagaaaagaatgtggattctaaaagtactttaaaatcatcaagtttcacaaaggcttaacatgacagagcaattaaatttgcctaaattggagtagcccagaaatagaatggactgctttgggcatggcaaaaaagagacaagtctttggattcagagagtgtggttctgaccatagctcaaccactgtgtggctgtggacaaatcattaaatctctcagtccctcagtttcctcaagtgtactcagaggcaaacaaaagtaataaccacatgagattgttgggaaaagaaaatgagttaataatacataaagcacttagaatagtcctggtgtataataaatgttagctgttatgttttgttgttatttttgttgttgagctacccaagactagaggtgcccagacatggatttaatagcagtaaagaggatcttgctccaggcagggagttggattctaaagactatcttttaatgctgaagtttatgaagtcagtggaaatcagaaatatctttattctgttgtttcccaccagatactttttcctgtctctgcaaggaacttgtgggaagtctctaatctcaaaagctcagaaaattgacaaactccccccagacaaaagaaacctggaaatccagagttggagaagcagacagaggcctgcccctgtccccgaagtggctcgaccaactcaccacccagtgtcatctatcacaggacaggacttcagtgccagcaccccaaagagctctaaccctcccaagaggaagcatgtggaagagtcagtactccacgaacagagatgtggcacggagtgcatgagggatgactcatgctcaggggactcctcagctcaactctcatccggggagcacctgctgggacctaacaggataatggcctactcaagaggacagactgatatgtgccggtgctcaaagaggagcagccatcgccgatcccagagttcactgaccatatgaggagctgcagaaatctgtacaaactcaacagaggccacctagtcactggtccacataacccttgaccccttcttcttcatagaggaaacaatgtgccagtcttattcttttcttcaacaaccttgacttccatggaggaagtgctggccccaaggggtctgacacaaagacgggaaacccagtcggcctctagttttctgctgctctcaggcagcacatcttgcaaacagtttggagaaggaggctgtttttgttgaatcgagttctcaaatcggtttagaccaaagccattcttctgaccctctagataagcgtagcctacaacccagtgccgtaagtttccaagattcaagaagtgtatcaacccaggcaatatctcaggatatggaagtttctgggtttatttacccctcagtgcccagagttaaagtttcagaagagacttgtgcacataagggcttcatctcaagtgtattgcagtaatggctgaatcggggttaacatcccttccaggcacagcgagttggttctgctttttgcctgtaagccaaagaaaagccacatctaaaaagctactactaaaagccagaaagaaaagtggatttgaactcagtgtcacagactcttctgagtgttttagggtcacagctagtgtaagaggcatgaagaatagacatgcaaaagggaacgggtgcaccagagacccctgttttggctgacagaccatatgtcccaccagctggggaatctgacaagaggacataggtggcactctttttttaaagctatttattgtatctatttttaaataaaattgcccatcctcattcagctcttagaacaaaagcaaaaaaccctgtaaatcaggagatataagcacatctgcacccagaataggcccatatgatagggcaaccctgagcttaaacaatgacatcttcaagggtagaactaatctgaaaccccattcagcctattccagaatggggataggctgaaacccccttccagcctctggaagacactggcctgcatcagttagagtcagagcaagtgtcacttcacagggaaaagaaggattatatagacttcctatccctagagtttataaatgtcaactatataaaaaaagctcaaaacagtgttaaaggaatgaacagtagaattttaataggctgtccaaagaagccaggtctgctgtgggcaagtatagcctaaccctagtcttgtaaaataagccagaaagggttactgagccaccttaagctagtacctatatagtaggcaaaaagtacagaaatagatgcaataagtgtggtgagtctttgagcctacgagtcatgccaccagccataagttgacctatcacttgagaacctcctcagcaaagatgccagaaaacattcaatcaagttggcaaatgacacagggagctggccctctgaccatcttcctggcaaacctggactggaagggccatttgcagcactgtcctggagctaatacactgtttcactgcctctgccatataatgatgccagcactagccagctggtgggtatttggaggaatcctgcatgaggattgcccaataaggggcaggtacacatacctggcaaagtgatgatgatgtgaattgtttccagtgaggggattgagtcaaaacttggatctcaggtacctcaatttttcccccaatttctggctactactaaaagccagaaagaacagaacagtggcctcaggagatctgagtttgaatccttgctctctaggatgcaggtggcttgaagcagaatgccacacctgcaagttgattagaactgcctttcttcccaggcttgacataggtattaagtcaaaattacatgaaacccagtggtaaaaaagcctctgaaagctgtaacaccctcagtaataacaaaagggatttttatttcacagctaaagggaaaataggtggagaagttaaaaaataatgtctgatcctgttcctaagttccaaactatagccaacactctgatgctgctctttttcttgtaggaccaaccgtcccagtttgcctgggactttctcatttttacagagtcccaaatcctaggaaactggagcaactggtacaactggtcacctactcttgcccctctgtaaatcaagccaactgtgaccatccaatgtgccatcttacagggaaaagttataaccactattcccctataacataatgctaatgattgtacttagtacatttttatacttttatgatattttactgattggaaatgtcatcctttattaaaaataaacatggttttccatagttgcctgccaa

SEQ ID NO: 323 - DNA, 136234 bp, Homo sapiens
gagcctggcagagcagctgcacacacggcagtgcggaggcagagaaggggttggtgatacggtgctataaatctgtggtccagtccacctcccttttaagacgtcctcccccctatttctgttcttagttagagatgcagcagcttactcctgtagcgacctactaaaaagcaacaaggagaaagacatcgtctttttgaaaaaacgttctttcgtctcttttctttgttccttggtttgtttttcttgcccctttttgtttagttgaacggcaataggagggtagtctctccgtctttttaaactcttttttaagtttcccctcccctttcatattttttttcgccatttcttttagcattggactttggggtcgaaagcgtttctttttatttgcttcttttaagccgagcacagtttaggtttcgtgctgtcttaagagaactatccagcagcttcttgctcatccttattgggagaactgcaccgttactttaaaaacacacatacacaaaaaccttaagggagaaaggtaagtttcggtttggtttctttaatcattagttgcagcgatgcgctggcaaacccagaaaacctgtaagtgagcggaatacagaatatgaagttaattgcacatgtttgtctcatttcaaagctactgttctgcttttttaattttaaagagctagactaaaagacggtggacgcatgcttagcgtactgaatattcgtaaatgtccatggcagaaacttaagtggtaaatgtggccaggggggagtaggggtacaatgggaggttagatgtggagtgagcttcaagattgagatcggaagttcatttcgtggggagagagtgataacttgggtgttggggatgcatgcctctactttggctcagcaacggaaggacgggagaggctttacaatcattaaggggaatcagaagcctggactggcagattagaccagcgaaaaccacaggcttaattgcattaaccagatagcatgtgctggggagatgggattgccagatggaatttagatgctgcaccaggcagcgagttgtagttgactgaaaaaagtacatgccgcctgagggctggggctggggctgggctgaggctagggttgttagaagctgtcagaactcatcattgtatgcgggctctgattcacggactccaattatcataattcagttttaaaagaagatagccaatttggggctgaattcttaagcctgtaccggatatgagattccctttgttcagaaaagcgtaaataagatccttggagctgtgtctatgaagtgccggctgcttgggagcctcgctgtgctgggcgctgggaagtggattccaagccctgtccttggtcctacgcggctgacttcgccttcggggagagggggaacccctctgcagccgcgaggcttcgcagccaccccaggagccaactcggccacgtagccctcaccccctccttaccgcccccacttcctcgaatagctattgttaaattgacgccaggagaaagatggttggggatgacaagctgggcagataggcacacgcttcattttaacttttgtgatttctcagggtttaggagaaatcatttggctttctactgccaaagagaggatccagggtagatgtgggaaagggggaggatgttcgtgggccggggagggcggaaggggtggtggtggtggaacaagctgctggctttcctaagagaagtttaaattattggcacgagggggtgtgggtgagtgtgtgcgtgagagcgctcatgtggtgctcgagaggcagaggatgggaaaaagctacaaagccggctggggttaacgtctcgttgctcctcaccccacccactctaccggctgggaaagccagcgcaccgtcagcctcccggactggactctgcgaagggcggtgggggctagggatggcaaggtggcagtgcccaccactggagctccgcggcggacgagacctcgcgtggccattgttgcttaatttatgcccagcacgttgctacgtacccacctatttcacgtctgtacagaattaatacgaaagctatacaactgtgacaaattggaggttggataagttccccgtttcccattttcaagtaccggttagcaaaactgatggcgagactgggtattttctcgtaattaccggctgcaggtctggttttattatggcgagggtgagagaaatagccaaccatttagtatttactgttaacactgctggacagggatggaggtctctgtactttctccccgaaatgcacggattctgtcccttccccctctcatgtacaaacactccagttggttaagattctaaaccttcagccgttctccgcacccctatttattatacccatcctctgggggtgggagggagattaatgttttatttcccaggcctacactattaactgcaacctataaaacgtagacttacaatgaaaatttttagaaagtacacagcagacaatagtaactaaagaaattattttccaaattgaaaatcagtttctaaaggtcagaaaaagggtgttcgtgttttggggaacagaagggtaggaaatgtgtttgggccttaagacttccttgtaaaatggcttcttaaatgggacatctgaaagatttgtcagactatgaacagataagcccgcaaaaaaatatgttgagagtttcgaagttgttatggggttaacattttattttttaactctcgcccttacttattgctgtcattgcctgaatgtgtcttacagcaggcacttcttccccgttccctcttttaaccaagtgcttgggcaccccgcttcataaagctaacctgttctggagctcttcacaaaaaacgctacggttgtaggaagaagtggtttggaagacttggggaactcttctgagagctctcccataatttagtcagcgtcaggaagtagggcgtagggcattctaagagttttaggtttggattgacaaattaagtaggcccattttcgcctaacgttttggaaataggcatttttagcaatcccgcgtgcctgggatgagaatattataattaactatttactgagaggtcaaagaggcgcaggcgctttgagcagttttcccaggaacccacacaaagtcaattaaggtcatttaattgcaaatcggatttggggtgacacggaaatgctgatatagaatcagttagctgtatccggtgtccccagactgggtcgcacaaattaagggatggcctatctcgcttttgaccttggttgagccccctacttcactatgctgattagacttcgcccaagagggcaaatttgcctctcccacacccgccctgggttagacgagtcccctcccttccccccaaccccgctccgcccgtcgcatgggggcggggagcgctggacgcccttagcggaccttgctgcatcaaacctgcatcatgcccttgaagctgtaacctcggtcacgttcttgcggcgactgggtcgcccactgctcggttcctttctcttacctcctacaatttcaggtaggtatgacaggtgattttttaaatgtagtattttaggagaagggctaaaatcgatgcctttgcaatgaaaaaaatcccaactacaggtgctctcgtaattaagcggccgagcaggtgtaaaaacgtgctccagccgcgtggctccggggtgggttttgacttccagccgtggggccgggtctgaggacaggcacaggtttttctggggaaaagggattgagcttggcgaaggggcgggccaaggcaaggcagcgatgggacgccccctcggtgaagagttggccatttcgggtcttgagttggggggcgatagaaggatgcggctagcggcaagcgtttgcatagtcgagtgcaggatttcctactttgcgtttgaagcagagtacagcaccccgcacaggtactctgggcttatttaaacgtcaggttctctctagagaggcagggaggggcagcagggggctaagcctttattttctgtccagggacaggaccccttggctgcgaagtagggggaaaaagagaatttttaaaagagacacacatatgtgtgtatacttatatatatttataaatacatttatgaacacataaagtaacccccacgttagctgctctgactccccgttagcgccccgggcctcgggatttgcaaacttgcacctggaatcagcctcctctgggcgctcaacgctctccaccgagtccagagaaaccttgtcggggaagcctggtgagactcggaagtccggagggacggagctgagctgctgaagcccggcatctccctgccggcacggacccgaagggcggtcgggcagggcacgcgccggcggcggccgcggcgccgcgaactcgccgccggccccgcctcctggcgctcttccaagcaagcccctccttcccgccccgctacaaacggcgggaccgcggcgcctgggcgtcactgaggcagtagccggccgggtgaggagggcggttgccggcgcggcgcggcgcggcgcgggtggggcgggggttccgccggcttccagtcccctttcccgccgccgccgccgccaccgcctctccgcggagctcgccccgagcgactcctccgcggcagtgctgacggccagcggcacgagccgtagtagctgcagcttcgagtcacagcaggcaagtgctgggggcgtgggggcggggacggcgtccgcgccttgcccctggtccattttggacgccgaggctaaggtctgtgcgcgcccccgctgcgtctagcagggtaggggtggtgcgccctagtccgaactctgggcgggaacactggtgggggcggcggaggttgtgcccgcgaagttcctagagctcagcccgttgcggcgggagtagagagaattgggcgcctcgggaggtggcaccgcccctcccgtgggcacaagcaggttgggggcggcgggagccgagcggggacagtcgcgcctggcagcgtgcacgggcgtggacgtgcccgggtgcggccgcgtgtagcgcaagaaggaaactgttgagacgcaggtgagtgtattggagggaaagtgggggagggggcttttctagaaaaagggcaggattcctgtgttgcactggcaaccccgccttgcgggaggatgtgtgcactggcttctcccgcggaacacgccggggtggtgtctggtgtgtgcccacttgctacggcgccttcgcgcgcgcggtccttggagctctcggggcgtttggagacttaacaccggccgcgttgtgtgcggaggtggtgtagggccgcgggcgcccagggcaggagcaatgatgatcccctcgtgcgcgttaggtgaggcccgtcgcagccgcgcgaggtcgcagctcgcggtcacatctcgggtttgcgcgcgaggcgtgcgctgcgcgggaagcgcgggcgctctgccgggcgaggccggctctgggatttcagttcgcttgccgtggttgcggcagctgctcctccagcttggctggtagggcctgccagcggcggccggggtgcacggactagtgtgcgtgcactggtgagactgggggagccagcgtcggttcactggcaggtgctcctccagtggccgtgacaatgcttagccagcagtctttctcacggcatttccttaaaagcctccttgttatccttcagggccagagcgtaaaaccatgcctctagatgcgagctatgagcatgcagttgtagctgcccagatggtcatttagaattgtgtgcatttttaaagaccatctttatgacaaagattttcaagtcctatcgtctctacattttctgaaaacatgggaaaaggatttgctacgagttgtccactctcctttattccctccctcaaagaacggttcttagaagtgccaaaatgtaataccttcggcaaggacaaaagcgcttttaaaacttaattttctagtggccctattcctaataattcttcataaaaatttagctcagcctcaaaacttacggcgaatcagtccatttaaaaccattcgaatatcaattgctgtgtaatgtccccattccctcaagtaaaatctgtttgtttgaaatattgttttgttgcccttgaagagttttctcaagaatcgtttcgccagagtcgcttgaatttcccatttcttgtggaagctgacctggagtttccattttggtgagcgggtggaaaagctgtcctgcatctaccttgtcttagtaacctttgggtatatataaatggtgactgtattgctgagtggacccgaatgttactgcatttgtggtaggggccttctttataggaggtttgtagggatgctaaggtaacaacacttaaggttgtggggaggatatacttacgggaagttcgcttgcaaactatggggagagaaagaagaggaagaaaacatctggaagataaaggccagaatggggtaggaaaaattagaatatgaagaaacatgttacattaaattttctgtgattcctcctttgtaattttcctttttgagagagtatttttatttttgtgtggttaaaaccagccccttgttgcctgttatttgggtaactttgtgctgccacctttcagggagttagttgtttttttcttcctttgaaagacaactttaggtgttaagcccctccctcttccttatctgtaggtgtttccttcattgtgtagtgtcttctttcaggaacaatcaagtcagctatattcagtgctcacacactttccctgtggttcaagataattttagttataggatatgcttcttgtttagagcaagtacccactgctggtcagtgtctaccactcttttgacactcagtgtcaaaaggttactatggaaccttttttcttttctaggcctaagatgtgtttttatagatcctctctgatttagtttttttggttgatttgttctggttaccgcctcttcacaagagaaaaacaaagcctttctgtcccagtttcagtggttttagttaagactcagctcctggtaggttaagggagaatgatgctgtgagtgtcatataccatcattccttgaatcaaccttttgattatttatacacagacagatgctgctagctgaatccttgtaaccaaccgctcttggctcttccagccttccctgcttatcttttaaaaataatgtgcctcccctcctgccaccccacttctattctagaagcaagtcttaggttctctttaaggacacagcaaagccttccagaatatcctgacttttaagctgggatcaaccttttcctctttctttgctgaaagacatttttttaaaaaacctgtgacgcttttcaggcattattggcattgcacaagagcaccacagtggcaaattagccttcatgttctttttccccaaaggactagatactctgaaatagcttcttaagcttcttatcaagactgactttaccattcccctttttgatgacttgtctgcatggtagcatcagtattttcgctcccatttgatgtcttattaaatctatcacatcgtcacattcttattgccacttttatcactcataatgtttatttggaattgagagaggctagaatctgtggtacttagcttggtttggttacttttttgttgacattttaagggggctagatggtgtgccaccctgtggaaaacctgcccatctcagtctacccccagctctttgtttcttggctactcagctggacaggtcaaaaatgatagtaagctaccacatttgagtgtgtgtggggggaggttaattttatttttggcgtgagtacttagttatgggcaggactgcttttccagcttgtaaccggtatggttgcacatcctacccaatcttgaaattcttaagaatttttggacaaggttaccctgcattttcatcttgcactgggacccacagattacgtagcttttcctggttagttgccttcccacttgttagtatttagctgtcagtattgctgctttgttgatatattatagaactgtttgaaggctttatgtctagtgatgccacacctgactatcaaattcactatggaggacataaaatgcataaaattttttcttgctttggccattttcattttacaggtgtagaagtcttcaccggttctggttacgcacagagcccacatattgtagttcagtgccaaatccacacttttgtatgttctaatttgggaagaacatttattgtatatttatttggttcgagatactagacggtttatagtgctagttaattatttaaggatttcacataacgtaaatttgccaagtggaaacagaagacacttaagcttgaaaggcagtgcttattttaaggcttttacatattaaaagataagtgttttattatgatttaaatgataacttttggagtctgaattaaaagtcaaagtttgcgtaataaaatcttagatttttgtggggtacttaggacatttttcactagtaaatttaacagatttggctttcagcttgtgtgatgtgtatcatatgtttcattttagtaaggctagaagaattttttatttcaagggaagaattttttttatctctaagcttgtattccattgtgcaaaacaaaacaaaaggtaactcttgtgtgagcaacgctgtgctaaatgcattctcatagacatcttcatctttaatatcaatgttaagtttctagagattggtcttaataaaaataactatttttgcaacgagcattcttttctcagagctttgagttaggctctcaatgcgtgaactgaattgatatgcttaatgacatggtacctttttgaatattgctgaatagttctgtgtgacaacagatacaggttttcgttgtaagaaatctttatgaagagaaggatgggggctttgaggagtaaaataggtaaaataacccagaaagtcataagaataggtggaatggggataaaactaaaccagtttatagaatgccttacagtgtcttttttttaaataaacttgcagtttcttagtatatatttatattactgatatctattacatcagtttctgactgaaaatgaataggagataaggtctgacatgcaaaatcccctttcccacttttaaaaatgtattttaaaaaacttgacaaatttaaaattatacttactgtaagacagtaacagtaaaatgataggtttttttttttaagacacagtgaaggttttgctttagcactggtatattttgaaccaggtatgttatctacagtttgatgtacctgtatatttttccgttggccaatctaatacagatgctcctgataaacccattgcaagttgaaaatggcattaagttaaaaatgtatttaatacgcctaacctactgaatatcagagcttagtctagcctaccttaaacatgctcagaacatttatgttatagttgggcaaaatcatctggcaacacagagtatccatttttcactctcatgatccattgcctgagtgggagctgtggcttgctaccattgccctatatcgagagagtctcttaccatagactgctagcccgggaaaggatcaaaattcaaaatatagtttctcctaaacgtgtgttacttttatatcaccatacagttgaaaaatcgtaagtttgaaccatcataaattggggaccatctgtagtgatagatttaatccttgggtttttcctttgacttaaaaagtttatcatgaaagggaaatttatattctaaatgttcttttcttccagcattttgtttttgtgggttgttcattattggagattatttcagcaactttaaagactatgttaataggatatcacaaaaatcttttataaatatcaaagcaataaactattccttcaagatggatttttatcccctttttttttttttttttttttttttttttactgaaagcttttagtacacactttcttgactaatttcatctctttatgggactagggaatgatagttgttttgagattcttagctttcctgcatttctttagagtcattgtaaaattggaagttcttgttaatattgaggggctagaatctctttaagcatttgaagaaagctgtagctgtctcttcctagagaaatatatacaaataagaaatttccatacagtttttagtattttgcactttggaagaaagcgtgttaaaatgaggttccatttgggaaataggactttggcaattagagttgtcttcttatactagtgagaactgggtgaagtcattcagaggttcttgtctgctgttgagttagtgatgtgggcctttagcattctttgaaggatgactgactctaagctttcctgtctcatagtttgttttaaaatccattctgtttttgtaaacaaataatcacacacataaggtcttgtgatcaccgtgcccgtgcggccaatttgctgagttgtctcagtaggttttgtcacttaggttgaaattcttaatttagcacagccaggtggaaaatagtaggctagaagtctgaagttttcagcatctggtttggtttaattacttatatccttggtttcttaacctttgattgtgtataaaatcttaccctccccatctcaaggaccacgtaaagatgagcatattgaagtacaagattttttgacaatgaaatgacattgactgaattggaaaggtggtagtaggtggttactgcttgattagttttatatttttggctttcaatgtgttatgaaccatttttagtgattttgtttttttataatacaccatcatatgtttatttctgccatgaagtaaaagaaaaatcccagactgcagggaggatttgggagaattgtgactttggacatttcagtatggaaatagacatatttatacctatgatgatgggacttggaaagtttaaaatgcattttccttgaaaatataaataatgctaaaagattacatatgagactgagaatttagccagctaacattccaggaatataaatttcttaatttaaatttctcatatttttttcagtgaaaaatcaaaattttaaatttaaccatttatattaaaatagtccgcgttttctctgatttgaattttatttaacctcttatcaaggatccattcctatacatcacaaaatggagtttacatagaaatacatttttttcccctcattgctgatggtgtgaacatcattgatggatgccctgtcaagtaagttattggaaattgctcacttgttcagcttttaaaggatgtttagcactttttttattctttaggcatcatttgtgtatatcagaataaagcaaatcacagtgtatctgaaaataaattcagtgaattgggtaaggatgggaaaatatttctggagcacttgatcttgttttctctgagctgcttttcaaaagtaagaatttcttgttatactgatattgctttattggaggtgatatggcaggtgagggggtcatccacctttattgcagaggtatccagaatgtgttaaatatacaacatttattatagagggagcaagattttataacctgttcccaggtaaggcctatttctatttgagtttattcaacaccacttttgatctccccaggtgctatttactgattgctggcttattttgtttaaaaacccttggggtcttttctgtcctgtgcctctgaatgacccatggacttttcccaaatacgaggtcatcagtgcttttgactttcatctcttcccttctccatagtctccgcaaggaatttgaactacccacagccttcctcccctctttgggatgcgtctgtacttgccctctgtcccttgtttatccttttagccttgtgcttagttccaggtcctggtaatttggggtcaggtgcaacctgctcacttgtccctttattttcttatcctgcttgggcttttgcattggctcttatgcactttgttacattttacttactgaagaatatcttctgtgaccaagtgaatcactgataccagaaggagcagttggtatcagtggacaaattatttgtgccacaggtcctgaagggtgatccgtgagcttcatatggcctataggtgttttgattgccctgaactgtgttttaaatagttgtgagttgttgatttacggtttggtaatatataaagatctggagccaaatgtattgcttcttgaaaacttggaaggatggagcaacaacaatggagtccacatttatcgactgcgccttaaggatgaagcatggcttgtttcactttgaccttggtttgtttgcctggccttggtgtctctaatgctatacttcctaaagccacgtgaattaaaaagttaagtgtaaagacaaaggcagtagttctaaaggttttatattcgtttgatctcttgtatttacagataatgtttgaatcatgttaaactgctccttacatatttagatcttatagtctcctttacttcagagaagatttgtcttgggtctctccttccttaacccgtggttgaaaaacagtttctccttttataaaatgagcttctctcagcttaacttaccttttctctcctccccccctgggattttagaactgtccccattgggagtagggatttctccctgccagttgcctgcttctatttattcagatgctttggggtcaacattgctacttgatgctgtaaaaactgataggatgttatgagctgtttaaaagaggcctgtggcccacctgctaacctcattgctgatgttgtgagcttataaatgacaacagatttataagattgttgtaaaaaaaaaaaaaaaaagccgatatgagacttccaggtgtgtggtttatgtgtgtgtgttatttctctccctttcccctttatttttttcagtcttcagccttttctcccccactccagaagcagcagggcagccttagcaaggccctctcctatgtgtgccgtagagcagactgatgcaccagcagaagtagaaagaggctccacatgtcatgtttggaccaatgctgtaattttattttacaataaggaaggtggataatattaatctactcctgagcataatagcacaatttgaatagcagagagcaactttggtgtgtgttaatgtctagtgagatgaatatagttgaatgctaagtaggtagaaaatgtcagtgtggagccttccttttggtgactttaagcacttacatttctagttaacttttgttcagcctggtaaatagatatgaagatctgttgtatcaacccagcattaatgtagcttcttaggatggaacaatgcccataaaaccctgctctcctggcagccacttcagctaggccagttataacgatgaatcagaatgtgcccctgtattgaacatcttagcaaaacccttcagaataatagcttaatgttggcagttttaagcattggcttactctacaacccagccaattttttttttttttttgatatttggagtgttagtataagtgtatgctcacttaaaaacttaattttgaattaactgtgtatgattttaaaaaatcattgtaggtacatttggaacttatttttcagaggcacttaaaaattcttggtaccaagcatcttctattctatgattatatgattcttttaggtgaacgtgttgcttgtttttgatgctccctgcagcatctcattgcggcacctcagggtggcttagttactgggttggggtggggaattgaatatcagtaaaaacaagcatgttttatccccctaaagattgggagtcattcccgtggagcttctactgtgcaataagaatgactttgatatatgtgggctgctagttaacttgaagcttagggcttttccaaattaatctaattttgtttttgagtttgttgaaggatcaataaaaatattcttctaggttttgtgttgagattatgttcagaagccaggaagattgtgtaatacttattgtttcatcacaaattactgagtgctggatactgagaacgttgagacttgtataaagtgccctttacctcatattccttggtctctacctaaggagatgaggcagaaaatgataacttaaaaaaaaatcacacactccccactcttgcatttaatagtagaaactgagtgcttgaggaattaagcaaagagatatatccctgttgtctgggaatcaagggatcaggccaggttgttgcttattgctttagggacaggactgtgtcttttcttggtccattttgtctattttttgctttttatgtcttatttccctcccccgttcctcccatattgtttttgttacctttgattttcttttatggtatgagtaactatttcctagtttgccaggagctcagtcacaggtgaaaagtatttctgcaaaacctactcaagtttgagggtgtggctagagagagacaagctgtgactgtcttaattccactgttgtcccagaagagtagatctgaggcacgttgtgtttcaaactacatgaagctgggtgtttcccccagagttttattctgttgacaacattatgtgccagcagcctcctctgggtataacatttatttttcaaaacacctaggaaaaagtcaaaataattacaacttttttgacttcctcccttttgggaatatagttgcaggagcaagaagcaagtaacaggacagaagctggggtgcttttcagagcattgatctatgccttctccttgcgtcatcttcatggctaaggccatgtcttccaggagcatgtgttgtctgggctgctgactatggctttctcatgccagtgcttggtgttctgaggcctggccactgcttttctcccttaatggcatttgcattactgtttcgtgggtttttttttttttccttgaaaggtgatcgaacagcttgtacgctgcgttacctttttgatttagtggagaggctcattccttcagttggaactggctgttcggggaataatttgtgttcttgtttcttggactttttgaaaaaattttttcccaaacagtttggctgacttataaacattgttttgtggatggtagggtgaaatctttggttttagagtgaataatagtttgtgacctagacaggaagagtgaagacatctgttttggttttccttttgtacaacttctatggtaacttccaaatgactctcccttgagaatgcaacagtaagaaattttgtgttggacagtcaagttagcagtggattgggatggggcagcagggatctgccactttttagttgttgacttaccattaggaagatagaaaaatacgtggagttggcaattgaagatggtgaactaccacaaggtgatggaaccaggagacacggagcatttcctctagtaatggtgattaacaccaagtttttctgtccttatagaaacttgccacagctccctgggaatgatgttttataggtgaggaaaatgaagctcagaggtcaggtggtttgcccaaggatacaaccaagtggggaagtaggatcaggtcagactcctagttctgtacctctttccatggatcccagaatgatgttctttctacttttggtagttctgctggctgtagtttaaggtggctgaaatcagatccaagaagcaactcagttttcatgtttgagaatgtattgcttctcttaggggtgttttgaaataaaatggtgtgactccagcagcaattgtatctcacctccatattaaattgctttagaggctgtttggttccccagtggtggggttgttgtaccaggattattttttatttttataattttttttaaagcttcactgtggtccctgtagcactcctagcagtatgcccacaacttgttcctcagggccaggattctgaccttggattattttaggtccatgactgggtgacttctggaggcatttccatcacaggctggtgactttctgatgccagctggcatccttgacttgcaggattactttttggaaccatacaaagtatggattggttattttctgtaagcaaggaaatgaagacactgtcttcaggctttttttaggatgctgttaaaatcaagaaaaaggtgaaagtgacattgagataaccctggctcattgtagtagataatctgtaagggctgttttttgaacttgttaagtttatgaaaaaaaatgtgttcccaatcaggcaggattttagaaatactactttttgttctgagaaaaaaatggcaggtcaagtgttcaataggatgtttgatatccaaattggaataaacaaaatattcacccagtaaagattgttcttgattcacctttctccagtaagttttcagtatttctccaactttactgtttctccaactttactgtcagaaaaattggttgggagtggatgacaaagaattacagattcaaaatgacctttttgctcttccctagaaagaggccatgtgctctttttcattacttgatctctcacatagtgtgtttttaggagaaattcaggaaaatttgtggaggtcactggaacagcagaactcaaaagtctggaatagagataataatttaaagaaagaatatagtacatgagactgataatcaattgaaaattatttgcatatgtaagtaaatcatgaatgataggtaatcttactagaatttcaatctctacagggaaatttttgcaaaaactgccttaactaatcccatgttttctcatgtcttagatatgcaatttttatattacttttgagtctcttaagtttacttaatgtcctgattctatgtcccccaaagctgtgaggttagtgggtgcatctttcagtccaaatgtcttagaattgagaagctgaaatagcttcatgccaacatgttctctgatttcttatctctgcaaatattttactcttcctagagtataaatattgtccttgtgctatggaaagctggtgtaaacgtgagaaaataaggtcatcagattgtctctacatatttcaagcaggtgcctctggtataaaattggccaacaggctatgcacaaagcagtcaggtgggatcctgacaaggctgctccgtactggttagctgtaatttagaatatcacaggatgaagcagaagttaattgttgagggtgaaagctcaatagcattttactcatcatcacattttataggacatagtaaccttaaactttgaccttaatacgtatcatttctctttaatttttgttgtgtttccttaaatttggcgaagactaccagagattttgttgggtaaaatgctttgtagctccccagttccctatggaattcagaagcattaagagatccagggactttgttaagttttgggtgttatagttcagactccttaaggaattttctggaactttacccataaggaatttttcattatggctaacatttctttctctctctcattccctgtgattattctctgttatcgtctcaaagaaatgtggcaatttgatgacagtttattaaatagcctatgaatatttgaaatgtttacatctaaagtttttattagtagccactttaaaactttaaacttatctctcttttcctagcatttaacattttattattttattgtgtctggcctcctgacatgaatggcattttgctctttttgattgtccttctattcagtttttgatttgctgatccagccttttctgccccccagtactttaaaagcaattattttgccagtttacatgtgaacatttcttggtttcctgtgcagattttcatttgtttagtaaatatttgtgatcttgctatatgccacatatactaccttaggtattaagactatagtagtgaatacagtatactccctgctgatatgaaacttagagtttattggaggagatattatgttaaagttctacaaattattacatataattgtgatttgtgctgtgaaggaaaataacctttaaggcttataacacagtgtgggaggtgattagtgaagatcatttgttgatttccttcctagctaccttatttttactgtacataaaaacagactagtttttaattttataggcataaggatagacagaggtcctaaaattaaactctattctccttgataaattgatggtgaactttgagtcctagagctgattcctgccacccagcttctatcccaccatggatctggctttttatattttttacgagaaaccgattttaatgttctttgcaggacaacgtaatttggcaacttttactctgaaagctatgtggtgaatgcaaagcccagcagtgagatctgcattgtctaaatcctttattctctttacccatggctttgaaaatgtgttggattttgaaatattatcagtatttgtttaaataacactttctaatgtattaattgatgcagtaagaacttaggaatatttgttaggctttttgcttggcggaaattagaatttcactaattcatccacagttgtgttttgtcattgattggattatttggtttgtttatgaatgaccttttagataatccctttgacagatcaccccattgctttaccatattgtgttccttccagtattcatttaaattataactaaaaggaaataccatattaattggaattgtttttaaaatatttgttggagtggaagagacttaggcagttttttttttgtagaaactttggaagacatttgttgtttaagagtgtcgaaaaatactttttaaaaaaatgtcagtggcttctgtggagttccttaatcctaaagggctaggtatgttcgtaagagatgggtagaatatgggaaattactctaagcaattggaaaagacacggaaaaaaggttaaggaaaatgaggaagtgaattttccatctggctagtttcctcattcacacagatcaccagacctaaacagtacagtgaatgcatggcaaggatatgatattttaaaatagtgtctttctgaccaccttattagattattaagcttacttgactaggctcttagtttcctcagagaggtggactctggcaaacagttttatttttaatataagctggtctttaggaagataataaaaactttgcatgccttttagcttataccatttataattgtttgatttaacatggatatagcatttttttgtaggtggatattatttcatcacagcttttagatttcagccccttttccttaggtgcagaaggaagctactgaaaatatagacagtaacctctactcttgatggaatttggagagaagtaaaccaagttttagttcaggagaggagaattttaattttacttctggcattacagggacagcaggtatgagagttaaggagctgttacggaatgggcacttggggtaacaacttcccattgcctttggtgtctggtctctccttaatagctttttatattggtttaaattttcagggcacaacttaaatgttactttcaactacattggaagctctttgatgtcagtgattcttataactttgttttctgaatatagtgggtcttattgtcttattactgatttttttttttaagagatttagtctcactgcagtggcatgatcatagttaactgtaactttgaattcctgggcttttagggatcctccagcatcagcctcctgagtagttgggtctataggcatgctttactgcaactggctaatttttaaatttttttgtagagatggggtctcaccatcttacccaggcttgtcttgaaatcctgggctcaagggatccttctgctttggacttccaaagtgctgggattacagacctgagccacctcacctggctagtctgatttcttgaatctaataggtcctatgtctttaaaatgaagattaaaattatatatgctgaaggtaaatgttacatgcaagtttttttcttttaattgtgtattcggccttggtattttggttgctatgaagttgtataacttacatatttaaccaattggagttaataaaaattgttaatatttaaactatagcaaacatttctatgttttttagatatcactactatatgatggtaattaagtgctggatactgaataatattttaagatgactttattaaagtgctatttcttttcatccatacctgtgaataattaagaatttatggtatctgtttgcagtctagttggtgagtttaatttacttggaccacccagaaaaaaatatacaatgatgcttctgtaaccactttgactaagctgaaactatgctttttacatgtatttatgacctgttaataccgcttcaaagtgtgctgtattgaaaagatattggctgcttcaaggttggactgaaatgactgtgtttgccaggaataaggaggggtctccatggatgaccactgggccagtcatttaatagccatgtggaaccctcttcggctatcagaagaatgttttctgctctacactgagtatctttggaagcagatagagaagttgaggtctaaggtagatgctctaatcatggatggctaactttaagaagcgttattgggccaggttctcctgtggtatatgccaagctcatgctcgtgcatgggtacacacacaagcccaaggtacagtagcagctccatctgttttgtatgttgtaggcctgccttgacatagaactgttcgttctaaagcaactcattttaaagctgcagtatgttaaatgggcaacccttcattgaagaccttgggtatgttggcagtttatcagcagcagggttgtgatcctgtcacttcttgttaatgaaggcttttatttagcttagcaaatcatatctcttgttagtatccactctctcaaatggtagacttgaaagggatgtttgtaccgttttatttattagtagccatgagggtgctttggcccttacttgttatagccatttagccatatttcttttacggagatgtggtttgttttaaactaggaaaatccccaaatgattaacgtctttcttttgtttatcatttttgaaatggctttttatatttcctattaggtggtctttttcttcagtctcaatttcacttccattttgaaattcctagcaggggtttgtcagagcatttatgttcccagtgttgcagctgactttcccagcatttatttgttgtccttgggtagtccaagaggataagcattctgtcttcatatttaatgtacatttcttatatataacaagttcaaggacatcagagaatgttagagctggaaaggccctacccatagtgttgaacagcagtctcatttcatatacattcagaactgatgctaagatgtattgtctaaagtcttaggtataatgattgtggttggtgactgtgaccttgtggctggttcccgacttgcctttacttcccccagtgccctctctacactgctgcattatttcctttttaaaaatgtaggttatgctttggtgggactgcaaactgataagttttcagaagttttttttggcagtgactagcgtaattaaaaatgcaaatagactacaaaccagcaatttctatctttaaatttacatttttgctttactgtataaggtatctattgtaagcactgtttgaaatagcaaaaccttggaatgttcatcagtaggggattggttaaattaatcagggtatatatctctattatatagtatctgtaaataaagagtatgtgctgatcttgaaatgtaaaaagcaaggttcagagagcattcaaaaagatctatgtattaagtatttacttttcctcacctgtgccattacatgtttgtattttctttgaaagtgttcaaagtgttcatgaaattgttaacctctcaggtgtagatttgaagaaattaaatatttctgtcttttattgcttgaacccaggaggtggaggttgctgtgagccgagatcatgccattgcactcctgcctgggcgacagagcgagacgccgtctcaaaaaaaaaataaataaataaataaataataaatccatcttttaaacagttctgtggttatctttttgcatcaaatatatattttttaatttgcacaaattattataatagaattactaattacttcaaaagctgatcccccttgggcttttcagagcattttaatagatttgcacttttcctacatatgagctgtttgttagcattcagtgcctgccttgagctgagcgttgtgcatggtcgttgggtgctcagaaacactaggatgtggatgccactctcaagttctccaagtctggttgacagtccagaggaagaaaacgtgagtttatgggagtttggtgaggtctgctgcaaacattgggaaaaggttcctgaaaccaggtagatgtagtagcacttgtgaagctcttttatacagatagggggacttgtccccccaccccacccgcaaccccccaggagaagaggattaagtgtggtgtactcctagcatgtaaggaaaaagttttgattattggaacatgggtgggtttctagaggacactgaaatccatacaggaacatttctcttattttgtttgagagagccagccttgggacaattttacaggatggcttagtgtgaggaaaactgaagcaaaagacatgggctgatgtggctaaaggggccttgaggaggaacgcaccagggctttgagaggaagatggagcatgcatggcttcctgactagggtgtaaacccccaaatgaaagtgaaaaactgcttctggcatgctttgtattgtgtaggagagactcataagatactcaagcatttttctaaaccagtgtaagtatgcaacatgaaacatgtaatagcttgttatgctttataaagcatcttttctgagaaccagaatatacagttatattcatgtttccccgacaatgtttatgtaaaaattttacattaaaggcagttgagatgattcacgtttttttcttataaatcagggtagtactgggcatgagaagtagtttacatagtcccagagctggaggaacatccctttgaaggtaaggagagtagttggaagctgttctaaggtttatctatatgggctaaagggattcaccataaaggcatgcttatgtagcagtgaattagaccagtaattctcaaagttcttgatcagaggatccctttgtacacttaaattattgaggaccccaggaccttttgtttgttatgtgtataaatatttactgtataagaaattaagatgagaaagtttaaaaacctgtttaaatagcaaacccattacatattaaaaaatatttttaaagtgaggaatatgtatatttttaaaaagtaaggctggcatagttttacattttacatttctttaacgtctggcttaatagatctagtcaactgtattctcattgcaacagactgaatgcagaagcaagtgtcacatataacctttagaaagctctactgtacatttatgagaggaaaaggcattctcttgacttcccggatgtatgaggaagtctcagaggactcttaggttcccaggctatgctttgagaaccactggattagcctaatggattcttggaaggcagggctaggcccatctgagtcttaaaacttggaatctgtattgtagggaggagtgggcagtcatctttctaggggaggggtaaatttaagaataaagctgtggaattggagtactttggaggtaagattgtcttcaggagttgaaaacttgaatgctatgaccagattctatcactagcaaattctatcactagaaagtttggccaagtcttggggcttgctttctctgtctaaaaattgaggctgtgggctagcgtttggaagtcccttgtagcactaacattattaatgtattttttatagcgctcttgaccctttctataaatacatgcccacacatctacatacaacatacttggagcacgttggaaggtcacatgagctaaaaatgcacctcggagtagttcacctgctccatgcattttcttcttcctgtattggtttcattgtcctagtttgttgctcaagtagacattgactaaatggtacccaggatgtgtatagaatcttaacctctttcttcaattgtggaacacatctgcacttaaaaaaacaaaacgaaacagataaacaatcttccactgtatttatttcagcttcccgcattagtcgtgagattaggtgggtaaggaggagggaggtgaggtgtcatctaaaaccaccattgtcaatcagggctccacctgtcaattcctatttgcagcgcttgttagaagaaaactctgtgggagtcccttccccctttaaaatgcaaaatggggtgttggtagtgaagggtgcccatttatttttctgtgtatgattccacatttaatattgtaatagaattaatttctttctagtttcaaatgtgctgatttagacattttctgcattttagtttggataactaatgcgtgaacattctgttgtcagatgttgacctttatacaccctaactggatcaagaaatgtcagtaacagtgacatctagcattcttaatgatgttgatttctgtttaaaactaaagtcccttagctaggacacttctgttggtgagatcattgatactctgggatttctgcttgcaagaaatttacttgtctgaaaactgagtagcccttgaaggcaaagacacactttatattccaatagctcctgtacgtagagcttaatatttattgaatgaatgacagtataacttttcctttcaagcacaacattcaagagaagaaatattagtttttcattttgaaatcccttgtagctttaaaaaatcttctacctgagaaaatttctttgagtttaaaagaaataaagcagcagttaagttttaaatgttattttaaaacatattgagcctatttccagtaatgtttttgtattttgttctaggctcttaatatttatttcatacttcagtattcctgggtgcgtgtacctacttccaaacagaaagttttgagaaatagtctggagggcttctgtgtctgttaggtagctccaaattgaaataaaatataaaaatggaagacgaaggacagttgctgtacagttcacaattagccttaatttgtagatctctgctgggcccagctgtaaagtttattggtataaaatgtgttcttgatctggaaagccctcaaataaggtgccttgctttccaacaagcaggaaggaaatgttaatgccagttttcctgtggcttctgtttaatgtgaataggatcctctgaggagatttaaaaagcggctcattgcccttgaaggcacccgtatcagatgaagatagatctaaattcgtatttgaataaaaaatttcatacgtcatctgttttcccaaactaaatttaaagtttagttttaaacttttactgtaagttattttaagtaagtcaaattttctaattttgtagattcatttgcttgagaagcattctatactgattctctactccccaaaaccaagtaatctgaagtagttttccaaagttggggataatgacctatgttctttgaaagaattcttaaaatttccatctgatatcttaagcatatagggctgtagtgcatttcacttcatccttgaataagagggaagggggctaggctggacatgttctgcagcttgtgaggtccttctcctcatgtaagcatggtgccatttgctcattctggcttagtagagctgctcttgggcactaccatcccgggttgtgaagggtgcacttaggcccctgcatgagcagataccctgggttacacatttggtgttaaaataagctgagaagaggaataggaactctactgttttaggacttgattgttacacctccagttcagaatttggggtccctattcaaagtcactccacctatccaagccttcgatgtctgacctacagaatgggaataatgaaaggttgattgtgatgctttatggtgaagccctcattattagctactttcttttctcatttttgaattgggattctttggaagaccaaagaaaacttgccttaatgaggttattttaggagaaatattggactttaaggcttttgtttctttaatgctttgtttctctaatactcttcaaatcttgcatagggaaagattaggtctgtcccctgcacccacccacagagtccttggacagctgtgtttaaaagtgagggcttggtttaggtttgctgggagacctcttaaagcttttgggaaaggaaagagaatgggaaactacaaagggcttaagatttttcttttcagtggtaaatagagccctttcagggttttctaattcttaatagatttcttgcccaactgtggtctcttatttggtgtgttaggtctgtaaagaagcttagtctagcaggaagcaccttgggtgtggtaaggcaattaggggctctcaatagaagatgcactggtgacctgcatgtctttcaaactagggtgttggctgctgggagtagcaagagttactattgagcatcagtgacaaagaattaatcttattaagttggaaatggggctggatattgtaattagatgtgagagacccagtgatcagacttgaggattgtaggccctcaaaactctgcttttccccactcacgtggtggggtggagtaagagtacaaaatcttgttttttatggagggacatctaggttctagtccaggtttcaccctgagtgccttaggaaaatactcacttttcaggtcctgggtttcttatctcttaaaatgcgggatgggaaacaaggtaacagataggattgcttttctcctctaaagatctgactaggtgatgttagaaccaggggaaggtttggtgctactcctgacttcgcttgttaagaagtcataggcgagaggtactcctttgtattttgggttttttggtaggtagtttggagatagagatggaaaaaaattttaaaaagcttctgtgagattgcattagattttcttaggctttctagtcatattatgtctgtcttaattgtgtaataattagcactttaggaaggccattatgataagggttttaatagttcttccatccttcactttacatgaccaccacctgggagaaaattttgtacacatatcaaggaagaaaatgatcaagttttggatttaagaacctaattgttaagtcttgattaaatgatgcctattaggttgtaattatatctatctataaaaaacagatggtggcagatttgattgctgcatttcctgaagcagttttttaagataatgaatttaattacacgtgtgcctgggaaccattttaaaccatcgagaagggaaaaatggacaaggcctattggaaatggaaagtgttcacctaggtgtatagcttttagcttgtggttttgaaggataggaacagaaaaatctgactcctccctcgtctcccttcccacacacaccccctacaaaggcagaatccatattctgatactttatatgaaatgttacagtaacatttatcagatgtcaaagggtatggcatagaagtggttgtgtcagcataatttgaaggctgcttctctgtgccaggcactgttctcagcagtctacatggattcactcacttgagttcttacaaaactctgagatgtaggtggtataattatctccccacccccgccattttataggtaaggaaatggcacgtagagtgatttaagttacaggcccaaagatgcagtaaatgacagagctggaattagaactcacgcagtctggcttcagagtgcacagtaacatctatactggaattctctctgcccaggtgttagaactaaattatttaatcaaataaagggtcctgttttgctgttgcgacctttttgcactaatattatgaactgtctcctcagataaataaccttgcagaatttaggcacatttgagttagaatcttgtaagagacagttaaaggacagctttggctctgtcatcctgcctgaaggtttcagtggctccctattgcttacagaacagatttcaaacactttcaggcattcagagttctcccttctttgccggatgcaatgtttacttcatgaactagccaaataactttttctcttgatcatgacccatgaattcttatcccatactttttttttcttttcttttctttttttttcttttgagacagagtttcactcttgttgcgcaagctggagtgcaatggcgtgatttcagcttaccgcaacctccgcttcccaggttcaagagattctcctgcctcagccacccgagtagctcggattacaggcatgcgccaccacgcccacctaattttgtatttttagcagaggcggggttttctccatgttggtcagattggtctcaaactccagacctcagatgatccacctgcctcagcctcccaaagtactgggattacaggcgtaagccaccacgcccgcatcccatactttttattcactcaagtatatcattatggcaaacctaaatcgtacacctggtgtcctttaaaaaatctcctctcagtccctacctttaattatttctgtcattatctaccacccatgcccctcctgctaccaagcaccctttctgttttaaattcccaatagctggcctttgggattttattgaagtgtatcatacatgagatttaccagataacatgaagatgacttacacatttcttcatttagtttgtgtttatatttacactgttcctgtgatgtgctagggacttagcatgcattacaatttaagatcagtttaatgatatttagaaagccgtgctgtttttgtagtgcctttactggttgtatttttttgaaaacgcctgtgtttttcttttaaacagaggatagaggttcacttttgggcttaagtagaattagtaggattcattctggattttggttcatttttgtctcgaatcttaaactcttcaaatcctgttgttagctgctcaggactcagctgggcagatggtagctattgtacaaattaggacattgaagcataaaggtcaggttaattcaacctgtgtccatttagctaaattggctaccatgtcatgcttgtgagttggactctgcatcaaccagctttgcagtccattgtccctgtcctcattctttatagttagctatctctcaaatgcatccttactatttggaatgaggaaaatggggttaaaatgaagagataagcaagtcagaatctattttctctagtatattccatgactgatattgaatcagtagaataacctatacaaaggacgaagggcaagggcaattgttctcaggatatcttttacatatttgggatattactctgttttgaaaaaaaattatagagctataattaaatatcttcttgtgcagggaactaactctacgtatagatttggcaataatagtgtcaaggctctccgtaaggatggtgtaaactctagatatcttacttatagacagccattgccctagtgaggcaagtcatgcatctttggatcataatgactaagcagcagaattttaatctggcaattttgtgggtttaccgttagagtgtgaagctgtttttgccttttggcagtattttgctttcctcgagatgatctcagctttcattaagatttcatctgactgaaaagattgatttttgagtaggtgagagtccttttatgtgatgtctcaaaggacagagtatgggtcaaatcgctcttcaaatggacagtaattgtgaggaagaggctttttaaatggagattgcaagttacccaaaggttattagaagtaagagcttttatatgtaataagcttccacatttgtaaataacaagaactgtaataacccagtgaaagccccataaccagggcttgaaccagagttgtatgttaacaatgatcacccttctaactctagtgttttatagtaggacctagaaagttcatcatttgtcttttggtttaattcttctttggattgcagaagtatattactgttcaaatttttgtttctcataaaaattaagaaacaattgaaggtccaaggaccaaaatgggtacacttcgttttcataatattccaaaatctggtgggaaacaatattgatcaagaaagtaatttaaacatccacttatgcatttttcccccggtttgtaagaaggtggtggtgctgcagagcgggctgtgaagaggagtcaatattaaaaatgattgtttagctcttagaaattatttcctggaaatgctaaatagcaataaaatcaactttcagggaggagacacattgccattaaatgtcttgtttttgtctcagctttgtgatgaacaaaggaatattcgttcttaaatatgtggaatcttgagattttaaattccattttaatagtggcaacttaaaatttcttctctgtaagaggttctgtattttatgacagtcctattttttgagacattttatatatcaatgactatggacgtagtattttccagtacttacaatgttgttttccccatttattttttatttttatttttttgagatggagtcttgctctgtctcgctcaggctggacagcagtggcgtgatctcggctcactgcagcctccgcctcccaggttcaagcgattctcctgtcacagcctcgcgagtagctgggactacagccatgtaccaccacacgaagctaattttgtatttttagtagagatgggattttaccatgttggccacgctgttctcgaactcctgacctcaggtgacccacccacctcagcctcccaaagtgctgggattacaggcatgagccaccacgcccaacattttctccatttcttaaatagacactggcaggatcttaggttcttagggaatcttatataaaatataaacaaactacccacttaattataatgagcctgtggtctataaagataaggacttaatttttcaaagttgttgactttgaaaatattgcttagaaatgtgttttttaatgtctgaagagcagtaatattattttactcctttagtttgttttgatagcagttgatcaaaagctattataaggcatgtatacagatgttttgtaggtgtgcataagataaaataaggtgggaaatttggttaaagaagtgttcatcttctttagctttagttaaattttatttttctaggagctgtatatacctaatttgtatggtcctggctctctacttattattaaaacaagagaagatggaaggattaatgcatactctgccatattttatctgtattccattggtcaggaaatcttcccagattgtagggagcattgccaagtggttggtgtactggatctgaaaagattagactggtttccccacacaaattttttcatgattttcctaaacattaaggattgatttgtacaagctttgtgtaattttaataattagtctggtttgactaatgtagttatttgatgtaaaaatggttgatactttggaattctcaaattctaggaatgtttaaaactgaatgtatcttattcagccttgaatttgaaaaatgggggctgtctatccagtatggattagggtatatattttcactccctaagaaaaattgttgtcctcagaagcttttaggaactctggcaggacagcttgccttttctcctgcaagaggcctgctgtacgtgtgtttaacagtcaatctgttgtagaaagtgggtggttcttttcccctctttaggggaagctgatggcccagcccttttgggcactcagtgttctaggaaagtgtcactgaagtccctgaatgttacactatcagtttgcttttgattccaggccctgattgtagatgtcattggtgtcatttctttgccctaccaaccctgaagttagaaggggaaagataagctcatgaagcagcttgaatgctgttggtatgctagtcagtgacattggagtatctctgggtgctgctgactgcagtgccctttgatttagatcacaatgatgaaagaactaaagctcttctagaattttatgtctccattctggttgggtttctatataaagatgaccacatacaggtggagtcattgatggggccttacaaatggctgtatgatatagtgcatgctaagttaccaggaaagagctcttggaggactgtttttaaaggggtaagcaaaatttattagagaagatcagcaaagcttataatgaagagcatgcgtgtaaattggaaccagtagggagaagatcatgagtggagaaaatagttataaaagtttggaggtggaaagtccactgagtgggacagaggctattttgggggcatgtaaaaatcaagagccaggtattcaggttgttggaaatcttagtatattactgtgttttgtcactcacatgatgaaaatcaataaggatccagtataggttacgaagctcaggctctcataaagagagtgttgaagaggcttgttatgatgttctttggaggaatgataggggaggggatcgttgaaaattgggaaaatctgagagactctattagttttgttgctgggatttaggtgatagctttagaaaaaaagttgagggtttgagagaagaactgattgagctcagatcaaatctatatgtgtgtctcatggtctctagaccttacttaggatgataatacttagggggagatgagagcctctgaaaactctgaatttcatttgtgtcagatcttcccattttctatttatgtggagctgaaattggtaccatctttcagatattgtgtaagtacctggcatgatttggtggaggtaaaagcctatttgaataaaatcagtatgtggcagagcagcagttgagggtagaaggttttgccataacaagccccttgtgattgtgtaatgttcttcagaacttctttcttccagctgccatttagaaaggaaataagcagagaggacattccaaattgtcacaacaataggaataaaagcaaggaaacaggccaggcagtggtgcctcactcctgtaatcccagcactttgggaggccttgcggggagggattgcttgaggccaggagttcaagaccagtctcaacaacatagtgaggaccctgtgtctacaaaaagtaaaaaataaaaaataactgggtgtggtgatgcatgcctgtagtcccagatacttggaaggccgacgggggaggatagcatgattctaggagttggaggccaccgtgagctgtgaccacaccgctgtactccatcctgggcgacagagtaagaacttgtgtctaaaaaataaaagaaaaatatgaaaaaaggaagtaaataaaataatgcaacagattcagaggatggttatgggtcattttgaccttatgcagggttttggcttgagaagttgggagaaaacattagggatggattagaaagttaaaaaggcccttaaatgaaggtctgtatgtatacaattgatggtatttgagcaagtgatagcatgagatgtttttgggaagttgaagctagccattatataaagatgagcatgttggaggaggagacagatttgaagcagtgtatatgatgataaaggcttgccctggtctcatgggaattggaggatgaggggtagatattggtagacactcattttagtgaaggtaaattagcagttatggatagatgacagtgttgattcaaaagcgagggggcatggttcagtggctacaagaaggtgctctgacttatgatggggcttatgtcctgataaacccatctttaagttaagttgaagatgtcataagtagaaaatacatttaacatacttaacctgcttaacatcatagctttcgcctagcctgccttaaatctgcttagaacacttgcattagcctataattgggcaaaaccatctaacacaaagcctgttttataataaaagtgttgaatgtttcatgtaatttactgaatactgacagtgaaaaatagaatgatggtgtagttacttgaagtgctgtttctactgaatgtgtatcgatcttgcaccattacaaagtttagaaactgttaagtcaaaccatgtaagttggggactatttgcatacctaaggttcagattccaggaaaagattgggtggcagcaatgagaggaaaagacaactgagagattaagaattggtgtgggggttgtattagtttgcttaggctgccataacagaataccatagcctgggtagcaaaaacaatagaaatttattttctcatggttctggaggctggaagaccaagatcaaggttttggtagtgttggtttctggcaagaccactgtttcaggcttgcagaaggccaccttctcactgtgtcctcacttagcttttactctgggtatgtaaagaaggagaaatcattggtgtctcttccttttcttatatggacaccaatcctattggattagggccccatacttgtgacctcatttattcttaattatttacacttatgacctcatttagccttatttcctgaaataattaaggaaatagagtgaaaaacagagtggttgtgtagttacttgaagtaccgtttctactgaaactactgaactacacaaccctgttttcaaatatagtcacgttggagattatggtttcaacatgttaattttgggagatacacttcagttctctaacaggggtaagggtatttaatttctcgaggcatgaacagaaatgattcttttcccctgaatttctgatctacagttttagtttttcattccagaagggaaatgctttctcatctttacgattggtcaagactccttgctcccacccctgcgattagcatttgccgttttcaacctggagatttcttttccatttaccctgtctgtacagtagtttgtgaccacctctgccttttaaagttgagttttgacaattgatatacaattgatttcttctctaacctcttcagttttatagtttgacctcttgttacaaactgcttttaaaggcaccatgcttatgctttaaaagccacttaaacagaacatatatttagaagacaggatgtttttgccacagatgtcaagagggtcttggcagtgttttcacagaatgtctgctggtgtctgtgcagctctgagactctaggcactctgtacttagagaacatgtagaggttaagtgttcatcaggagacctgcgatgtttgtgttggaaatactaagagatgtgaggtttaggatgttttgtgttgtgttgctctgtgtgctcgtccagagcagacatcctcaagtcagaacttaatgaggtatgcggaaaatcaccaggggaaccgtaatatataaaacataaaattaaagctctgggatgaatggctaatgcctagttacattagatagtcagtttatagttatttgctccagcctaatttggctgtctattcaaggtaatcagcagagagtcaaacctttaactttttcttgagggactgcagtgagccttttagctttctttacgttgagctttatggtgacagatgagatgaaggatactatttcacttccttcaagtttttagtgtggcctcattatatttgaaagtgaattcccagagcagccgatatgcctgtaactaatcctaagtagaaaatctattccaaagcagaaaatatattttggctttacctgtgcagtcacagactgggaaagcgggtattggggtgtctaataatgtggatttaaatggtttggttagaatatctactctcctttcatccaaccaggcatttccatatatttttgtattccctctctttttttctaccacagaagtttaatttcaagattttctgtctcatctctctctggtattcattacacctgttacatctgttttgtttccagtacaaaacagcactcggacctgcctcttttacattggtcctctaaccaaagaatgatttaggagaaaatttgtcatttgttgaaaggttgttttttttttttccccttttttaccatcaacctgtcattttgtgtatcttaatggattattcaagcatttatagccctttgaaaactttggtttcaggcattagaaattaatgtaatttaggaacatggttaccccttaccttacctctgagtgtcctacctgtatacattcaggaaagggtttaaaaagcatagaacacttaaaaacttcaaatatgttttctcatttataagtgacatttagtaaagtcttgaaagatataagaagctaactgttttgcaaccatactgttttcctctgggctgtctttaagaatgtttatttacttttctggggaagggagatatgtgatagcttgtataatacgatacattatttaggaagcaatttcttgccattcagattgtgggtttcggatcatttagctaaaagattaccctgctgagtgcgtggaaatcatcttaagacaaaataaggtttgtgaaaatgaaagttgaataggaagttgtgcagatgaccaagctttatcattcagcaggtgtcagattttaagttgtgtggattcttttgagaaataattaaaagttttaccgaattgtattactattttgaactgtttcctcaatactatgcctcaagaattcagttgaggacacatatgcattttaatacgtaattttgtatgtagcataaatttaataaatcacttaatatataaattcactatttgtgaaatgacggtcacttcagtagggttaggggacatacattccaccttaccatttaggaaaacttgcatttcttgtggctgcgtctagtgtctgggcactggcctagactgatatagagggtcactgaccctctgtatagggactgaataagcagtccctctatatagggactaataggaactgaataagcaggccaaacttctattccccatttactgagtctttaacaaggccatctaaagttgtaatggtaagaaggaaaaaattgggggactatattcttacactgccctctataagaatacagaagccgttggtctcttttcttttgcttggatggcagtagttcctccttacccacagtttcgctttccatgatttccgttacctgcagtcaactgtggttcacaaatattaaatggaaaattccaggcataaacaattcacaagttttacactgcgtgtacttctgaatagtgtgatgtaccctcatgctgaccagtcaggatgtgaatcctccctttgtctagtgtatccatgctgttagtcccttagtatagccatctcagttataagattgactttcgaggtattgcactgctcgtgttcaagtagcccttcttttactttcagcggccccaaagcacaagagtagtgatgctggcagttctgacatgccaaagagaggatgttaaagtgctccatgttccctttaagtaaaaaggtgaaagttctcgacttaaagaaaactaaatacgctgagagatcacatatacataacttttattacagtgtactgttacagcagttcttagttattgttaatgtcttactgggcccagtttagaaattaaattttatcataggtatgtgtaggaaaaaacatggtaggggtcagttctatctgaagtttcaggcatctattggggcttttgagtgcctggtaaaaaggggactgccatatctcatatatttattccaataactgaatgagatgataggattattttctccatttcctaaatgaggaaatcaagacttaggatggcaaatgctagaagggatcaccgtagagttaacagttgtaactactaggctatatccgattgctcagcaagctctgtttattgtcactcacttgttatattttatatcctggtccattggctttaggttagtcaactgttattttttccttattttcctaaaattcatacccattggttacattagctgtaaaagtcattttgtgctcccttcttacctacagtcttaaaagtaaaaattttctaacctgtagttcattctctcagcaaaatgattccaacctggttttttgcgcctttttaatcactgcttggactaaagcctgtgttcagactttccctgaagttagtctggatcagctctgcctcagcacctccactgtttttgaacttctgtttgccctctaaaagctggatgaattccccagtctctgattatttgactcttgtttgtttggcactacctagctgatagtccacttgtcttacaaaagtcttttacagtggttctcatccttgcttgcagattagaatcaaatcgggtgctgataaaaatgccagtatctgggcccttaggagagattcttatttaattggtctggggtgaagcaagatattggttattttagctgcttcattgatgtgtggtgcaaagagcatgggctctggagtttgttagacccacattggcaggttttgtgagttctggaaaagttaatcttttttttttgtttttttaagcctatttcctcatttgaaaaatagggatgaggccaggcgtggtggctcatgcctgtaatcccagcactttaggaggctgaggcggttggatcacctgaggttaggagttcgagaccagcctggccaacatggtggaaacccatctctattaaaaatagaaaaattagctgggcatggtggcgggtgcctgtaatcctagctactctggaggctgaggcagtttgcagtgagctaagatcatgccattgcactccagcctgggagacaagagcgaaactccgtctcaaaaaaaaaaaaaatggggatgaaatgacccattttattaagttattaggatcacaggggggtaatgccctttaaaacggcttagagcatggcctagcatatcctaaattaaattaatagctgtcatcctaccctgtccaacaatgttgtcttccttttccaaatgctcatattctttctcacatttgccgtatatatatctgttgccctttcctcatgtttgaattcttgtctttcccattaaaatttatttacaggtccaagttcctcagtgatgttttattccattgtgtgcttaaataaaagtgtaccttttatcttttgcaatatattggacatgaaaaacttccaaagagaaatagagaaacagcatcagaacttctttgaatagaaaagtaaactgggtcatgtgggtgtcactttaaaattccagtggcttagatttttaaaaggctttcctttctctctctctcttttttttttttttttttttttgccactaaaatctgttactgagactactgcaggtttcctgcttatatactttttgaacattaatgtcttcgttttctgtcttaacaggctcctggtcctatctgtaccttgaagtttaatattttcctccaagcttcttatagcttcagggtaactttctgagtgatacagtctatctccagtaataaagggcagatcaacaccagttgaaagggataactgtctttctatttttaataggtacatttttattgagctgcattttttttttaaagtgtgaaagagactctcgccctcaagtttcattgttattcttctgatatgtcagtaatcacctttgggttgttgtcatttcagtagctcagggtcaatatatattgctaagtcattcatgtcctgtaaatttcagtatgaaataagcatttactggttccttgcctgaatagtctgagcctatatagtttatctcaatataaattagatctttgttgcttacatcattttgatgaaattaggtattatggttataatttttttaaagttctccttgactttcctggtatgttaaacagcttttctatgttactttttaaaaaatagtgcacacgatgtgggctttcacagcaattcttctggaaggtgacttttcttcattgttaacagagataaatactctgcatttatcacaaatgtttcaaatgtccttggatagacttagaagtctctcaagttcagctagcttgagacagagtacaaaatagaatgtagcatcagtgaagaccagtcaggctgttcttgcagtagatcactatgccaggtgacctcatagtgaccttcaagtaccgaaaagtctgggattcttacttattttacaatctattctttgggaatgtaaattcagtgaaaaagttgagatactttatttttgagtgggacccagtgtctcttcctctatcaaaccgatcaactacttttcccattgtgtgtcctctccagttttgatctgttattctgctcagactggagctggtcatatgctttggaaatacctgtttacagattgatgcagacctggagcagctgctcattgacagaataggtctagatttctatgtcgtgactgattcgtactcatactgggagttttgggttaacagacgtgagacagtgaggattgagctatagtggcttcaatttgaaggggattgtttcctcccttgttatttttgttttcacactatccttaaagtaatgcaaaatttgggagatatctgattaaaaatgtttcattttgcctatatttgacttgtaggtgcagctgtgataactaaaagatcctaagtccttttttgtcctccaggacactaagttaaattcatcaaaattctcattttataatatgctttggtctatgtgtgggctcttacttggctgctgaagaacattgaattgtgtgaacttgtatgactttatcttcatatctttcttgttcatcttccttgataaacactttgttttcatttcttgtgctttgatgaacagtgctgctgtgaactctgggagtggctccctctactgcctcaaccctcattgtgacagttgttccttgatatatgtacttctcagggaagtacaataagaagtaaaactgtacattgtgggaggggaataataggtttgtcaactctgttttgccaaggaaaggcatttaagaccatctgacacattatctattatcactgtcatttcctggtttgcttagatgccccaaagtaggatgcacgtaacttcacaagagaaattgaatatatttcactttacaaaaaactcattacatttcttattttgcctggaaccaaataagatttttcccacaatgtctagtgaagtacttggcatttaggcccaagtctacttatttttccctacggatattaagtgtttcttgtacatgatcaatttactgaattctgacattccacataaattctgattaaaaagttaattggcagtgtgatgtaatgggagttacaggttgtgccccacctctgcacctacctagttcagaaacactgagccagcctctgggtttcatttccttcatttgataaaaaggaatggttgaggatagatgggtttcaagatctctgtagcttaagttttatccataattgtaaaactctgcctgctgggttccacatattggatgtaattgcatccctaggatgacattcctcagggtacaaattatgtcttattcaccagtcccactgcccccaacactacctagtatgtgtgtggcaccatcctttaccttccaaagaccaagtattacatatatgtagtcatgtttatctttagatctcagcttaaatgtcacttaatctgcagaaggcttttcttctgatcactgtcccagttttattcccacagcatccttttttccttcatggcatgaactgcaattctaaacattagctttattctttggcttgtttaatatgtctctcccactaagttcccttagtacctgtcttgtttatgctatagtctctgtgcccagcatttttgtttttgttttttgagacggagtcttgctctgtggccccaggctggagtgtcgtggcgcaatctcggctcacagcaagctctgcctcccaggttcacgccattctcctgtctcagcctcctcagtagctgggattacaggcgcccgccaccatgcccggctaatttttttgtattttttttagtagagacggggtttcaccgtgttagccaggatggtctcgatctcctgacctcgtgatccacgcgcctcagcctcccaaagtgctgggattacaggtgtgagccaccgcgcccggcctgtgcccagcattttaaaaatgattgcaactatgtgtactttgccctttatttgaacctatgacaacagagagcctagtgcacatggcttttctctgttctgagcctgatttttttttttcatctgtcatccagatacaatctctccttctcacacttaccagattgcgtcctgtgttgtggttctgcatgtgttcccttctttgcttagacagtaagtgggaactccttatctgagtcatcttggttatccagcacagtgccctgcacataggatttgcatgttagaatgaatgcagatgtctgtccttcaaatgtgttgatatttgaggcatatctgttttcttctgtgtccttttagtggtgactaaagccttatttgaaagctccatctccaagaattcctgatgcctttattcaataatgaacctcgttgttttcaggttagtgcatggccactttgtagttgtgcagaattgtaccagtttttcatgctctctgaagttacatgtttttcttcagtttaactttcggttttccttggagttactccatttaagtggcttcagactgtgagctgagtgagatcttgctgtcttccagtcttggcaccttgaatatttacttttgtttacaagctagtttctctttggctgtttttaatttggaggactaaagtgtaacaaatgaggtaaggataattctgcttattaatgtcttatctggaagtatgatgacttcacgcctccggagagtagagtttggctacctttcacaggtattggagtaaattccaggtatgcttattgcccttttgagataagagtttgttggatgcatagaaaatgaagtgggctctcactctagccaaatagttaccagttagtatcttgggatatctgcagactcagctgagctctcaaatgggagaggggatgaaggcacaatgagcaactgagatgggaagctgggattggaaagagaagaggctatcaaagaaatttgtcttccttcctggtttcacttcagctcacttcttgtgccccggggtctccatccttagctatgcttccacatcgggcccaagtctgtttaccaaaccttggtggtcaagcaggctggtaaatagtttattaataaattcaggtagaatcgcctcattggcagaatataccaagaagtatttgagcatataaagtggttttcttggtatgggatggaacgtacgctaattgtcttcaggctaaatcttagttcatggttgcagctctttaaaatggcttaagctcttgcatggttttttgttttggtttggtttcttttcgtttgtttgtttgttttttggagacagtcttgctctgtcacccagtctggagtgtggtggcaggatcttggctcattgcaacctctgcctcccagattcaagtgattctcctgcctcagcctcctgagtagctgggattacaggtgtgcactaccacacgcctgtaatttttttttttgtatttttaattttttgtatttttaatttttgtatttttagtagagctggggtttcaccatgttggccaggctggtcttgcatgtttttgagaatgctaagactctgcgttaagcactatgctagcctctgagcaaatgcttacgatgtactttgattttgaatttttcaggaatagctatagcgtgtgattcttaaattgccaactaaaacatcaccgtctgctgttcagtaataaaagtgttttgacttggttatctgcttggacatttttatgttaaagaaacttcttggtcgggcatggtggctcacgcctgtaattctagcactttgagaggctgaggtgggaggatcctttgaacctaggagtttgagaccagcctgagcaacatggcaaaacctcgtctccacaaaagattttaaaaaattagccaggcgcggtggctcacgcctgtaatcccagcactttgggaggccgaggcgggcggctcacgaggtcaggagatcgagaccatcctgactaacacgctgaaaccccgtctctactaaaaatacaaaaaattagccgggcgtggtggcggttgccggctactcaggaggctgaggcaggagaatggtgtgaacccgggaggcagagtttgcggtgagcagagaatcccgccactgcactccagcctgggttgcagagcaagactccatctcaaaaaacaaacaaaaaaagatttaaaaaattagcggggtgtggtggtgtgtacctgtggtcccagctactcaagaggctgaggtaggaggatcccttgagcccaggaggctgcagtgagctgtgatcacaccactgtactccagcctggttggtgacagaattagaacctatcttcaaaaaaaaaaaaaaaaggaaagaaaaaaaagaaacttttcttaaatatgctattctgctgtatgttttggtggcttaaatatttggtacttggaacgtagtatattgtagaattcctgatctgtttggtgaaaacatgaccttttgagggaaagaagaaagcaaagcctggagtgtgtgtgtttatgtgtatctttgaccattaatttgaatttctcaggttgcagtgataatggcagtttgaccttaccataaattaaagatgtgtttttaggagagcatgaaagcagaaaacaattctcaagaaggttagtgccttgagaacaataccctactttgtatagtgcctgaaattttttataagccattcttttatctgtaatttgttataacttatttcttttaataaccctgttcgctagcagagtgagaaaaatctgttcttaatagatgagggaagttatgaacataacaaacttgttgagggtcacagaatcattaagaaatagatttaggaccagcagtgattgtctttggactttatgtaggcttttaccttcgttctagtctttttttccatatccctgttagtttgttagcctgggacttgggaatgagataattgcttctctgaggccactcctaaccctgactgttttatgtgaaagcttaaatttgctccaaatttcctgaatgctacatagtgttgtgacttgcccttttttggccttaatttacctggccatgtcttaactctcctgaagagctgaactaaaatcttcattttggtataaatggatgccttaggttctgatgttttagttatggaaaatagtgcttatgttttgggtgctgctgtgtgttacacatgatcatttgatttgagtttagaccaaatactcttatttctttaaccttgaccattaatgaagaatataagaagaatgttggtataagccaacatagttatggatgtgagctaagaggtgtgtttaagttttacgaaggtcacaggaaattgaccacaaattttctaagaaaataattataaaaagactcataggattcaatattataaactttcaacaaattgaaaatatgcttaaaaagccattttccaagtttattaagttggaaatttatcttaagagttaataacaattgaatgtccagggggaaccctaaacactttttagtgtttatatttgaataaatgtgagagcttcacattctgtttagaaaattctctgttgttagactgctttcttatttttgaatctcatgcatgagattaggaaacaagtgtaaaatgattattataatttactattaataccaactgttgatctgttctcagttcaaaatgttttataatacagtcctggaaaagagaatcaacctaagttatgtgtgaggttttgtagaatagatgatattctctgcagatttaggaacccatactttactttgcaatagagattggacttggaagttcatgaagtttttttttttttttttttttttttttttttttttttttttttttttttttttttaaggaacactatcaccgattctggggaaaaaaaagaaaaagccaatagcattaacataatactctgcaaccttaaaggtttgcagttgataaggaataatttaatgtgccctataaaacccacagttttggaattgctccagctttttatttttagctgtggcttttagttaatgagaagaggtgaaaagtatagtttctcctggtctctgcttgaaatcacagaaactttccgcgctgtgaaagttcaggggattttgggagaccatccttatgaattggatggtggtgtctcctcctctttgttcaggcctctttttctagagaatagcaaagaatggtgagttgattaccttcagattttaaccaaactgtaattgctctgatattgtcaaatgcacctagggacagtgttgcagtattttgaaaccttacacaggaaacaaaatagcagctttggaggcagggaagaatgcattagtttctgagtctaaggaagccagaaggaagcccgcccacccactctctagctttcatattccctcagccacctcccagatcttccattgctgtgctataaatagccagtgtttaggcagggcgttgctttcttcccttgcctttgaagactttctgcaggccctggaattgcctttgttcctctgtctgcccactttgccagtgtgaagcaggttttcatgggattctactggggtaaaccaaaagcagcagaaaaagtgtgaagtaagacctcttatttacccttcagttccttccccacttacctcctgttttacctccaaaatacaatttgtggtttgtcatgagacagtttttagagcgttaacctggaaatttaatgttaattcaagggcttctggtgtagtgccaggtgatttttatcttttttgtgtgctgccctactcactgcctcatcctggggataaagcacttcattggcccctcctcttctttctcatagcaaaatatttgattaggtttgaattaactgtctcaaactcagcccccagaagggacaggatatacctaattctttgtggacaggatgactttctaatccaaatccatagtagtataaacaggccaaaatgagttatttagagtgctttgaatgtctgtggcagtcatattaggatgtttagtgacacagacttgatgcttttttgcctcattttttgttatgcatattcattagaatattttcacagatgattaggtctacaattaaagatcctcagtttagatgaccttggaaaaccccctccctcccccagtactctgacattctgaacctctccatcatggtagaaaagcatatactctttagcacatttgacatttaggctatgatactcttttacttaaaatccagcccttgcaggggccggaacattaaggctgtattgggagagctggaaagaaggcaccccatttatagggcaacctgctggctagtagctctgggaatatggactcttgccaaactttatttattaagcgaaatcagaaatatagttttatgaatgtgaaattgttacattggtgaaattttaaatgttgaacactactgtttttgtttgtgttttgttttgtttttaaggacgttggagaaaccacgtaacatgttttcaggctaaatctacccgctagctgccagtccgaactttggcctggaggttgaggagagttacagaatctgcttgtttttgtctatcccttgccacttttcctttgtccttcttttcaacctcgcacgtgatttatttaagcagagtccattgttggctttttattttttgtttttgcaagctggccctcggattctgccatttatttgaatgcttaatactttaagtagacttttgactcccatcccctcaatgttttcttcctgctggtcatagccactctggggggttttgttcaccatgcccttaggtatatgatgtactttgtatcaggaagaatgttcagagtaggccacctggctgctgctgtttatgttggccatgtttattagaataggtcttagttaatgtgtagtcaaccttggtggataaaaaagattcacttgtttccattttggttatttgtaatgtaggaggccagctgtctttattcttggcaagtaaaagtatgggtcattttccagttagagcaagaagttacttaagagaactaactgctgtcttggtagccagcgatgcagagcagttgttcttccttaattgatggcaggcaaatttggtctaattactgttccagtgcagtggaagttttcttcagttttaatttaccgttcttgcttctacctcatgataccccccgtttcccacttttgctctttagaaatggagaataaagaatagtgtcctgatgactcaactcaattccaaggcctgcagtctccagatctttgttgtgaatcctgggttttagcctgacaaaggatggatgtaaaaagcatgcttgggtggggcagaagggtatagaaagggcacgtttctaaaccatctatttcccttatagtgattctcaactagagactggcactcagaatcgtcaaggaactctttaaaatagtctaagatagagcgatagagtggcatttgagtagatctacactcttcacagaagaattgaaaaatttgggttcagggtcatggttccctttagaagagtggtttaaggatctttttgttcatacccatctcagattaaagtagtggatgatagcgagaatttctttttagctcgatctgaaagagattgcagtcctaactgctgtagactatattgcctggtacttagtaggtacttcctgaaagttttatcaacagttaaagactatttactgctaagcaatttacatgttaaatctactctactgagagttcttttaaagaaacttgtactttacataggatgaagttgtaacaggaaatgggtacctggaaaactctctgagcaattctaaatcaggaaaacttcagcctgctcttctttataatttaaaattttcttagtgaggcagaagtccactttaatgttcagtatcaatgctgtgcacagtctcctgttgtttagcactttaaacactgggaagcaaaatgcctcatttcttctcaaatacgtgtccacactcaaatattgaagttagaagtggtagtttccatagcagcagtgattttgccatctttttttttttttttttttttttgatagcaaactatttagcataggtcaggtagagaagggattatttctggctgcgggttcttaaaggtttccttgtgtgcgtttgacttctttggacaccttcttaggacacaggtgtgttttggagaagttccgtgaggggtggaatgagtggggttttgtacatctttgttttcccagcatctgagcacagcgcttggtacatgcagtagatcaggaatgttgcttttctagccttggggagtttctttactcctctttttggtattctacacaccagaccttggctgtgttggggagagagtataaacttcaggtttcctcttgattttacacattggtgatgagattggcttattttgaactgtgagatggtgacaatggaacacacctgtccctggttcctccctgaggtttatattgttttaacaaaggcttgtagctaggaattaaaaaatgctgattccacttgaagtttgagcttacaatatggaattagtagctatatgcggaaagagatgtgtgtgttagtggtaggacttgacagcctactttcccctttttccccttgacagtctaccttcctctttataaacaacctgagatgactttggctgctcctccagctatacagggttgcaatggaaatttttcccacttggcagggaacataaaaccacatggataagtaagggggttgttttttacttgccaccttgaatcacaattcatggcattcattctctttatggatctgtcttgatattttttactggggagataaaggtgagtcaggcatataggagcacacagagttatctggtccaactgagtggttcacagaaggcttcctcgaggtttgtctgctctcttccggtgctgaggatgtttccatgaggcaggagaagaaaggtaggctgttgcaggtggagaaaacaggttgggtgacactggaaaacactgggagtgggaagaactactgggagcttgttagagcttgtgtatatgatgcgggggtgctgggcatgtggatgaagaggtaggagctcggtcaagtcagctgcctcactagggagctgagatgttacttcataggcaacgtggagtgagcagagctttaaaagagatagtagtggagtgctgcccattattttagttagatccccacagccgtggaatggaggaaggattggagaaaggggcaagcctggaaatagagagatcagctaggaagctctagatggggtctcagcactgatttcaaatcccagtttctcacttaatacttgtgtgaactcttgaagttttgaaattctcatttgtaaattgaagagaatgtaatatagcttatagtgcataagatttgttttggagacatggtcttgctctgccacccaagctggagtgcagtggtgtcctccagccttccaaagtgttggaattacaagcgtgagtcaccttgcccgctccacaagaggattaaataagattttgtttgtaaatatctagcttgagactggcatggaaagaggaatcaataattgctagtttctttcccttgccatttatttttacttttagttgtaggattcgttggattctccagaaggcagggagatcatctgaacttctttactgtagcaaaagatactcaaatcccacggaaagttccttttctatttttcttgtaattaaatgtgattttaaagccacagtttaaattcaggtcatttttgaagatcatgataggagaaagatgataggagagtgtatgattttgtatgaatgtagatacatggatcatttgcctgatccattaattgtggaaacttgatcccatgtgatctcataatgtacacattattaatctagattctagggtataatcgtggattagatttctacactcttgttttctctgtattgtaaatctgaatataagtacaagatgcctggatcatctttggagttcttagccagaataaggaggtagcaatttctaatcttattaaaattccaagagcctgagcataagcaggctcaaagaggatgggagatgtgtatttttatggggagttggggaggggggtgggggtcacacacttttaaaaataaggtaaattaaaataggcaaggctgtaattctaatgtgaagtacttgggctgttagtactctgtatatttaaacatagtctttggaggtctggggttaaaaattgcagcattgcaagtaaaaatttttaacttccttagtcaccgtttgtgactgtgctaaatgtagtttaacatagcatctgcttcagcagtccaggacaggaattaacagtcatgattaggaaaagtctgcatactgtactttctgtccacagtctttcctttccatgttaaaaggctcccaacacgactctgcagccttgctgtccatttagatgtggggggaagaaaaactgacaggcttaatccaaaagacagataagcaaattttctttctttctttctttctttttttttttttttttttttttttgagatggagtctctcgcacttttgcccaggcttggggtgcagtggtgcgatctagactcactgcaagctctgcctcctgggttcatgccattgtcctgcctcagcctcccgtgtagctgggactacaggcgcccgccaccaagtccggctaattttttgtatttttaatagagatggggtttcaccgtgttagccagggtggtctcgatatcctgacctcgtgatctgcccgcctcggcctcccaaagtgcagggattagaagtgtgagccactgcgccaggcccagataagcaaattttctatgctaacattttaagagacatcttgttttgtccagcaataatgataataccctctgttcacttggcaccttagagtttgtaaagtgctttgacattatcagacaaaatatgtatatgtaattaaagcttttaaagagaacagacccctttacctgctcttttccttcctagagtggaaataattcaaaggctaatgcttttgtgatttgagtcttaagaataatttcctgttaaaatgtagcctgtaattgcgtatgtgctcccttctcctcttcagcctgtgggggatagatgtttctcatcaacacttgggaatatgtgtgtataatgtatatacaggttatacatatacatatatgctcatacacttgcttcatttttcatctgtaacatgggggtacttgccccacctactttttgagatccttaagcgttcgtttcaaatgtgctttacttgaatgatactaagacaacttgcaaagcgggaagtctgacaaaagtaggagtaagaggaagctctatgctgggtgagatggtgaggtcatcaatctaagcatattgacccctttctctgttagggggttgttcgaaattgggtgtatgtgcctgatgtggatataagtggataaggtctgaggctaagaagggccttacctgttctatagtgtctagcattaacttttttgaaaaacattattaactcttatatacattcttatgtagcagattaacaagacatttccttgagatacttctcgcccttagcaaccctttcctcactttggaatcactgaataaaaataacacttgcattgaatgtaaattctccccctcccccacttttttttcttgaaatgtagtaaataaccaggaacttaattaccataaaaagtcacagatgtacctaggtgtgttttgttctagctgggatgtcggtttttaaagaaagctgtctttgggggagcaagaggcagaggtggaccaaaggaaataaagttactatcttagggtgtgaatcttgtttttttaagatgcctcaaatttccatagtaaataaaacatagttgtgtctctaaatcacaagtatacatgtcttgggaatctcaggacgttacacatcaacagaaaagaaaaacacatttcataggtgaataccagtaattgagatgatccacagttcagagcagaaggaagctgtctgtattgatcaaggtttttagactccttgttttgctctccacaatacatcaatgaattctaagatatttatgtgccctgggatggcatccctttatttgtagcctcctaatgttactaaggaaataaatcttgttggttgacattttagatgcctttttttttttttttttttttttggtgtaagctgcttgaggttaaacagtgtagcatttggttttctatctctaagtcctgctaaataacagtgaaaaataaaatgttaacctcactggccaggaggagtgttgtggcctttataacatttgtgagttaaaaaacattatttttgtccataaaccttccttgtcttttattttccctttaagattagtcattctttctgctttggagtttgtacatgacagagtattttagtgtctgtatccaacagaggagctatgtttttaacctacctaatgaaaacactcaactactgggattaatttgaggatttccaatcagcctttcacaatttgtactaccctgagggggttcctgatagctgtgacttttgtagaagaatgtgaagttaatccaatttctgtgttgattactatgttaactgtcttaatttagcaattcagattaatctgcctataccaaacaaaacctctgccacaaaactgagggagtagttgattttattcttgttgtactcatatccctttttagattctattgccaaataatggcatggaaattaattgggtccacttaggttggaatgaaagaatggggttggaatgattcatcaccagaaggtaatgatttagtgtattccagcctataaccaagacagagttatctcatggcttaacctttactattgtagaggtatataaatgaccctgttgaaaaatacagattttaaagtttactcccattttacaaaatgtgacttaatctaatcttcatccactttgtttttaaacttttggggagagctttgagctattttactttgaattctgaaagttttaagggggctcacatagattacaaatcaattttctgatatactatgtttagtagtagttgcatgttttaagctactgatttgtgattttatatttgctcctaaatgaatcagttgattctttaagaagctggcagtggattcatttagtagcaaatataaagtgaatagtgaatatccaaccataaagtgaataactctggatttaatatttataaagtcaaaatttttgtatgttgggtttcctatatatatctatatatagatttatatatatatccttattttcttttaaggcacaactgtccataaaatctcttcctttgcttattcatcttgtgttcttagtgtccagagcatagtaaatgttttggtggtttgtaggaatgtgagcagttagtatctaaaccagttttttgacaatggatttcaacagtgtactgatgtaattaaaatgtagcaccttaataatgtgttttcttctgggtatatccagaatctgatgacttctccccaacttcaccctggtgggagtcactgtcatcctgcacctgaattgctgcagttgcttcttgactggtctgtttccaaactcactgagtcttcctgcacacccacacacaatttattttcacagtagccacatgctactcttttgctgaaaaccttttatagtttccttttttgttatggtggccttcaaggccctatgtgttccggcctcattacctcttagactcatctcctcctactctccctgttatctccttgtcattctgcacagcagacaagctttgcactggcaggtctctgcctagaatcttttcttctagatatctccatgggggctgtctttacttcctgttagacctctaacaaattactttaaatttactggcttaaaacaatacaagatttattgtcttaaaattccgaagaacatcagaagtccaaagtggttctcagtgggctaagattaaagtgttggcagggctgcattcctcccagagtctttatgagagattgtttccttgccttttgcagctcctagaggctgcttatattccttggctggtggccccatttaaagccagcaatgtcctttcgatttcttctcatgcttcatcaccctgacagtctcaccttcctctttcacttataaggaaccttgtaattaccttaggcccacctcagtaaccaaggataatctccctttctcaaggtgagctgattagcagctttaattctacaatcttaattcccccttgtcatgtaacataacatattcacacttctgggagtaggatgtagacattgaggggaaggggatttttcttcctatcacagcagccagcccatatctccttcaaaccttggttcaaagctcaccttttcattgaggcctgcttgtttaatgctggaaactacccgtcttcatctccacattttcaaccccccttattcttctctatatgtattccacagcactcttacttattgctgatgtactgttttcttctatgtgttcatacttgtatatgttctgcacacaccatccacagcaaatcagcactccaagatgcttcttcattgctgtacctcaggactctcctgaattcgtgggagctgcatggagatgttcgttgaatggatgaatgaacaaaacatgaaacttaagcagatctttttcgccagatctttactttcccattgctcaaactggatacctgtaatggacttagactgaagagaaggacttgggaccctaaactcattatcttacctctctaacctcaaagcttttgaacctgccagctctgaaactacaaaacctcagaaagactggcatgaaggagactgtgtactttgtccgtagaagtcataaagggccaagagacagaaaaacgttagtgtttgctgccaaagaacattctccttatgacgcgtgcagctgttcagtgcattgtctctgcaagttcttgggccgttgttagccccaaggctgaaaatgtgggtttgaggaattcgtagagctagtgagacagctaacatggtatgtgggtgggctggagaattgacaaggattctagattgaataaatcctttgacatttaaagctacaaacctttattttaggaatcacaaagcaaagagagttaaagaaaacaaactaatggcttgttcctgtaactgacattgttagccttgtgattttagcacttggttgactattctcttgcttaattaagtgaaaccacaaacatatcctgaaaataccacttagtgatttgaatgggaaagataaagcatttgctataggaatggtgtgtgtcgggcagatgatccctttgactgcctacccagctgtcatctataagctcatatgacttatttcaccaattttggagtgcttttgtccctgctgcaagttccccaaaggatggtgtggtaaaggttgtgatgcctggttttgttttttgtttgtttgtttgtgttttgtatgtttggctctaaaactttagagacaaatgtcttctgttcatctgtaacttggcatttagggagaggtttgatgtggtcagaaggaaggcctttgtactgggctgattctgtcctggtgtgctgtgtttgaatactcagggtattcaaagcttctagttgcaaataagtgtagagaccaagttcactctgtttaggctggacctttccagcctgagagataagcttgtctttgcctctagccatgattcttttaagagatgttatcgtttctgtttgcctaaacttttctagttagtatgaagatcactggtgatccacgacttaatcatgatgtgcttctaaatgccttcttcaagatctgtttaattttcctgcatttacctttgattttgccattttcctgaagttggacccaaattccacatgcccatatccataaccctgctggccagaggcttggatttgtcttgtcttccagggttttgtagttagtgtgatagattgttgaaataaaaatacacaacttttcacaaaggtagatggtttccttttaccatataataggaatttagatttcagtgggtgagggtggctgatggagtgcgtcaaaacttgaaaatatgctttcataattacttctggtttgaaatacttggtgggatagaaaaacaagttagagccactcatgattatttgtgtttccaatttatagtttaaatgtatttgtaaaaagtaaaaaaaaaaaaaaaagttacctagtttgtacacatttagggagggatttgctctttcagtctccaatttttaagaaactgttcttgccctttgctttttcaatgcttagtttgtacaaacccctgaaatggagatggggtgggtttggatggagccttgaataagggagatgggactgcataaacaaagctagaagagtgaaggtactggactgtttgagggacaaggagtagttcagatcttaaggtgcttgaataagtgggctgataaaagtagttgtacaggatttctgttgatacctagtagtttacacttcatttgataggcagcagggagctgtgggagggtttagaaagtctacctgggaacattgttaaggtagattaggatgaggagagagggaccttttggaggctttaatttgctggtcctgaagaagatgagagcccaggtcaggatgttgaccatggcaatggagtggctggagcaacaggcgcagcctcaccaggggtcattgtattggccctttcagcagccctgctatgactttaacccgcagaagtctggtccctaaatcaggtggtttctaggctatggaacctttttccctcctcgcaacattatactgagtgaacttaataacaactctcagaatatagttaggatatatttatttacttattttggagacagagtctctcactgtcacccaggatggagtgaagtggtgtgatctctgctgactgcaacctccccctcctgggttcaagccattctcctgcctcagcgtcctgagtagctgggactacagaccacgcccagctaatattttgtatttttagtagaggtggggtttcaccatgttgcccaggctggtcttgaacttctgacctcaagtggtccacctacctcagcctcccaaagtgctgggattacagacgtgagccgccgagtctggcctatttaagatgcttttgattaactacctggtttagtggctgtctgcaagaggtttgaaaatagtgaagaagctgattaccttagtttgcagaattttttaattgtaagattagaaaatatagactgcttttctctcatgtgaccaggaaactattggatcagtttgacttctcaaattcttaactcttcccagatatgagatataaagcatttattttctaaattccactattgtgaaaacagtagatgttaaaattcataaaggattatttaaataaaaagtttagaagtctttatggctttttggaagtacctgtgtgtataaaagtagagacaatcttctatttcccaataaaacctacgctttcaccatagtaacagccattttaccttggagcccagtgaaagtttagaatattctagattcatctatgctaaagtgccttttcgtaaattattacttggataataacaggaggaaaagcagtctgaattggcacaagtgatgtctaaattaagaggagaatatatattgaaacattatttttttaagccttaaaattaatggctctgtttcactggaatatggccttttttttctttccgaagagtttcagagccagtggaatctataaatagtacacagcccagttgtctgtggtagattgagtagagcagaattgcctgtccttaagtgaaggggaagtagctttacatttttagtaactgaattgttggccagcataaaggtaagggccatgtgagcaacttatttataacttcccataaaggtatgtgtctgcctcaagcggagaagactgtctggggtgcttgaaatgtaaaagtgcagtagaatcattttccatacacagccttcctatctagttggtgcaataaagtgattgttcacctccctggggctttcagaaagaggggtgtcaatagattagctcattagtgtccacctcctatgaaatagaagggactgaggcagttaaattaaaatctgttttatgtagtgagcaatgtttagattgaactcctgaaggtattcaggacatacatttatgcctgctttaccctgctgggtgtggtcctgctcatgtagtcttaactacagttgggttcttatgaaaaatctttcatgggtgtaaagcactttttcacaggttcagttaaactataagtagttttttgaaaaataacatagggtcagaccaaaatctcttgttacagtgggagaacggaagaagagtaaaatattttcatggcttcctgtaaaaaagtatgttaatcctttttgatagatgccagaaagtggaatccatcgttactggcggcattgctaatatcaagagtaaatcacagccaggattgcctctcaggataaaatttttataattatcaataagtaaaagacatttttggacctcttctgttattcactgtctatttttagaaactaagttttctgattatattgaccatttgaagcatctgcatatatggcaaaaaaagtaaactttggcttttgtgccaatatcatggctctgtttggtatttgggcaagtttcaataagtggtaaatggcccattaactatattggaggcctcatagcagcactaatttcaaatcgtgctgggtttacaatttacatattaaaaaatgttcacttgatttcgttcagggacaaagctgacatcctatgcgagcattactccaaacaatcctatttatcggtccaattatttcaattgaaagatgctggtttactgcctcttagtatatgtgagcaattctcattgaaactgttagaaaccgtttgactgtagtggcaaaataacctcacagggtttcgattcacttttaattttaagtcccaggattaaggatcatttatagtataatgtaacagtgtgggcaaatatagcttctcttaatgtctttctgatattttggggaaagagtgcttttatgcaaaccaatcacttaggaattgcatgatgactttttcccactataaaatttcattcacatttcctcccttctcccacatccttaagagataagacagcctgcagtattttgctttattttactttattttttaaatttttgaggtgtggtttacattagttcttcagaatagatgccaagataactagttaatactgttttaaaatcaggctcttaattaaaaatgcttatatttgtgcaagaaaactacatgttgaaatgaatttggaaagattagattggaattgcctcaatttcaattaagccacactgcatggacgtgctgggaatatcaatacaatcactgtaaattttgtacaaactgatttgttgcattatcttgctcatctaacatacggtactttttgtgtccatattgcagacggcaactccaaactaacatggcagtcagactgtgtgatgtggcttctctgcttagaagtggttcgtgggcagcagagccttggaccggggtctgtgggatttttcttaaattctgtaggctacttttttttagcatgttggaggagtgctgaggccataccaaacacttgaatctttcatttggcatactaattattcttacatttaacctattgtggtatggccatcattaggacttaaagcacattgcaattttaactgtagtggtgtatgtagcatcagaaccatgctctcgtatgtaatttttttacaatctaaattaggatttagcgcagactcaaaagagtgacaagcttttttaaaaaaacaaaaaaagttttggtatggtctgaatactaagttaccgtaattctatacattctgtttactatgtatttttttggttactaaattttgaagttatttacaattctttatgctccaaaaaaaaagttgaaattgtaaatctggctgaaaattatttgcccagtaactgttgaaagagtttgcattctgtgaacagttgtgttgagcctatcaatggaatatgcattatttgtaaaatatagcacattagtatcattttattctgagcagatggtcctatagcagagagatgctgtaattttcagcgcacacagcctactgcagctgttcacttgaatgttggcttaggagctcattcttgccacctgaacatggaaataaatgtgcaattaagtgaggagtgtttgttgtcctttctaaatcttgctgatttcagtcaatgaacactttgtatttcaaatgctatcccaatgagctttagtccgaatctcccattcgggtctcttgtagtttctacacccatccaaacttttcagtagtgatttaagtgtctttggccactttaatcttgtagctcattgtttccataactgctgggcaagggttaaccccagaagaatttttgctgtgaaaagagtgacccacagctaatattctacaaaccagaacagttatgtttaattaggaaatctgaaacttcccttttcaaattcaaatagatttgctaattataataaaacccatatcttgaattatttaagatttttaaatacagatttccaaaggtttattttccttcatccctttaagtattccctgagaaaacttagcttacgtagagaaacagcttgcagcttgtagaataaattcccacttctttgacaaggaaatgaagtcacagaggggttacaggttgttggatatttcaaaagctattctggattttgcctcatgtttttttatcatgacagcactgattcttgttcagtctgaccagtctcaatatgtccaacactgccttcttttgtaaacatctcctggcagtagagatttcttcctatatgtttatctgctaatgtgcccttttatttttcttaggcaatatgtgttttaaaagacagttttttctctttccttgtaaccctctttccctttactttgctttttttctttgcctcaagttctttgccttttctatgttaaagcttccctaaaactagcatcccgtcaattcagaattgtcagttttgagaagcagttctttgtggaggtgagagatgtatgcaatatgaaggataatcctttcagtgatgcgttgatttttagattccaccacagtcttggctgtccaaagataggtagttagtggaaaatgattttggaaaatttggggctgtggtttgtgactcttttgcataggattggttttaggaaactagatttaatactgcttaataagtgatttgtagagtagcctgaacagtttgaggccattttccccaattctgttctttatctggtgtttggagtttatagataccctattacttgcattttcaacaggcttatgtgctcagacgagaattccttgggctggtctgtttgcaaaagttgatatatttacattgttgttttcattgactggataggttttcttttttctcattaaaaagcagagtcaaggagaaacaccatatcgaagtgtttggggattttattttgatgttgtagatcagtcaccttgttggtaatttttagctgccaaggttgacaggagtgtcctattagattctaccagttagacaaagtattcatagctcattcccaagttaccttacagttagttcctttccactccctaaaatatagcatctgtttttttcttaccaatggtagagataagatattgtccatcaaaaacgttttcaatatgtaaccaaaacagtacatgttgacaaatttatatttttaaaagtactcttgctctttgatttttaagttaatggctatctgtcagttttagaatattgaacctcttaggataactgaaaatctcttcagagttaggtaggtcatttttttgttcatttttgtagcatgttaagcacttttattttctagtatgatttttagttagggttcaattctgtgccctttggtacttgattttctcatctgtggacactgcaggtgagtaaggatatgtgaatagacccagaatgtgattctagaaaatgtttaagatttaaattgtgcttatatgcatgtatggaatatgtatgtgaaaatatagttgtaaccttaagatgaataggttaatatgaagtgaaaattagtgtaggtattacactttttgttgaagcattgttgtaatttcattagaacgacttgtgtttagtgacaagtgtttaaattcttggatggagtctctaataggttgtgaaatatgaattctgacatttcttgttttctctgtttttagcaggtaattgctgccatggaaacacaactgtctaatgggccaacttgcaataacacagccaatggtccaaccaccataaacaacaactgttcgtcaccagttgactctgggaacacagaagacagcaagaccaacttaatagtcaactaccttcctcagaacatgacacaggaggaactaaagagtctctttgggagcattggtgaaatagagtcctgtaagcttgtaagagacaaaataacaggtaagcagttttatgtagatgatttatatttaacggatcgtgtctcaagataggagaaaataataagattactgcttgtaaataattcactgctgcaattttacatatctagattttctctctgttattacatcagcaatatgaaacttagtttaaaattttctttttaaatcataaactattttgggggcagtatatattttaactggactttaatgtactctgatctggacaggatctttggaaaatcttctaaaagtatatgtatctgggatagccagtgtcatgttaacttttatcttttagtaccctgagtgtatttaagttagcatttcaacagtgagatacaatatgtgtttgggagaggggaaaaaatcttaaaatgtgttttccttatgttaatataatcattttgcttatatatgataaaataaatggtaatgttcacattgtcagtgtataaacattttcactgatataataccaagcgtgatgagatcttatgttccgttccttaacaaggaaaggacatggtatatgattgtccttcttgttataaagataaagccttaattatagtacattttgaatattaggtgaaaatctccttagtattttttaagatttgactaaatttttagagtaaaccaaaacctaatttaaagagcacgttcttgggatagaagggttaatgcttcctgcaggagttgttttcaaacactaaaaatacatgaagttagacatacatatgaagttaaacactaaaaatatacgaaggtagacagactctgtggacttttcatgttaattaaatttgattgatagtgtataccaaattgctttacaaagcttataaccaaaaatataaaatggaatatttgaaatgagtaaaagatacttaaaggcagtgtgaagaatgagaccaggagtctgaactctcacctagtcatgtgacattggataagtcagccctagacttctggtttccattggcaaaataaggtaaaaggcagagaaaaagggggtaacactgggccatttctaagttcacttttgactttttcatacatgggactttgagctattccgttaatcgttagggctcattctctccaagatctgcaagtgagttctagagccagcccctggacttggctcataatcatatttcctcaagctacagattgagattcacagagacaacttactgaaatcaagttaaaaagctaagtacaaactgattgtcattgatccatagcaaacggccattatattttaattatgttgcttaaatgttcactatgatattaggaaggtggttcttatgtttctgaacactgataatcagatggatgagatttttcaatttcttttccaaaatgagtgtgataagcatatgtgaaatttatagtgtttttaataagttgaaaaaggtgaagaacaaaaggctgctcttacgtctctgtcgtgatgtttttaaacatctttttaacatgttttaaacatgttatcttttgtttttaaagtaaaacaacacccctgacatgtggattttgcaacctttttaatataaaagataaaaatatgataaatgacttgagggctatgacacaaatgatgcaatttctgattgcttagtagagctccccttactattaaaaagaaagatgcatgaacagagcacaaaagtcatgttttgttatgaaactgttacgaaatgatacattttatcattttataagatgaaaatattagacaaatcatacatctttcatattaggcatctgccacaggagacatcttacagatcctcacgtctcacctctagtcaatcttgaattaatcttactcttttgtgaatctttagagctgttatgtggcaaaatgggataaatttgagttctttatcttcacctcctttgcctctctaactttagtgtggtagacggtggtaatagaagcacaacacatgggtattctttaatacatacctagatactaaaaaactgtgtaaatatttctcatccatttccttcacctctgacccctgcctgttgtcttttcagtggcttgaggggaaggatgtaatggagatttccactgtggtaaaatttctattaaaaatatttggtaagcaagtagagtccccaagaaattccacaatggtcatgagtattgaaagatgtttctaaagatgtaagacgtttctatacattatatatatatatatatatatatatatatatatataatactatatatgatgtatacacatatatattacgtgtacactactatatatagtatatatttgtatatagttaacacataattgaacaaatttgtggagtacagtgagatgttttgatgctatatacattgtgtaatgatcaagcagggtattatagcatttccaaatctcaaacattcataatttctttgagagtgttcaaaatcctctcttctagctatttggaagtatactatacaatattgctaaccatagtcacccttctgtggaatagcacaccagaacttatttcttttaacagtgaccctgtactcattaaccatctggccccctccttccttcctcctctcttctccaccctctggtacccactattctgctctcgcctccaatgagatcagcatttttcgattctacctatgagatcgtgtggtatttggctgtctcacctcacttaacatagtgtcctctaagttgacccatgtttctggaaatgacagaatttcattcttttttgtggctgaatggtatttcattttgtatatatagcatattttctttatccatttattggttgatggacatttgggttgagtccatattttggctgttgtaaacattgctgcaataaatatggatatgcgtgcatcccttttgacaaattgatttcatttcttttgggttaacatgcagtagtggggatgctggatcatacggtagttctgtttttaattttttgaggaactttcataccatttttcatagtgtatttggtgtattaatttgccttcccacgatagtgtgtataagattgaaagatgtttttcaaccttcatttggtgagatactagtaattatttcttaacataagtattatattgacagacaagtttaggaagtgctgcactctgtagttctttatttaagatccatactcgataatcactgtattaagaactatgaaaaatccagcagtaaagaaaacctgtttgaattatagttccccggccttatttgatcatagagcctatttggggactgtgggaagagtgagtatctctccctgacagtagattacactgaacatggtgctataaaagcttttgaaatcatttgttgttaactggttatcagaccagtttaacctgttcacatcaataacatatgagcatgattcctaaaagaaacatatatgataataaattcaaaagtggagtaggtaaatctgaacactaggcatctcaacttctggtaatcttggtttgatttggaccactgacatatttgtaatatgggttaaaatggcttttagaaggatctcactcatttaacttaagcataaactgctttaggatatttttttttctgagtttcttactgaatacttctattgagtaaaatagtctagaaaatggtagtatctaaatctgggttctgagtggttgtactttgaaaagtaggcatacttcgtaagaggtagtactaatgtatctctagcaaggttttgaaagaatttgtggagctttggaccctgtcctgtggtgtgtagcattacccgtcttgtgcagtttctcagtacgtattttagggacagaccagagttctttggtccttctctaattatccagcttattctacctcctgggaagcagttgggacccatttctgtattccgattttgtaggagcatgtgcgttaattgggttacaggaaaactctggagtcactctacaggaagatttgaaatctttccttttcccttttcttaaatctttcttaatgctgaatcaggaaactatatctaaggaacaaaaatatctagttaggaaagtgtgtgcttcttaagtccttgaagagagtgtataacttttagactgtgtcagtgttagcaaattaatgtcactattttgatcgagtgaggattagggaagtacattaagaaatgtcttcagtagcaaatacaataatcttctctctagactaagttctatttattatgttatttgtcaggtccgtctctttgggcttctgcccagctgtatgcttcagcctgtttcctatctataggcattcatcatgagaagcttctgctgcttgtacagcttagctgactttagtccatccctttgcgtttttaaatgcacttgggagtccttgacacctgctgatgctgcattctagatgaacgaaatggattttatgatgcaaggaatgagtaataaagtgttacagtcagaaaagccctagaggtgaccttaaccaaccctctcccttctttgccccaaacatcataggtgatgagaggcccaggtttgtgaaatgactagttcaaggccacagagctattaagcggtagagtagggaccagaattctgattatcttatgctttacctggatgtttcctctttgccacttgttggaggcaagagctcactctttaaagatgaagcaaatggccaactgatgaatttatagagagatgtgtgatttttacagagttatccagagggcatcttctggcgagtgtgtcttctctggaaggagaatggaaggtttttgacagtaaggactgacgaatacaccaaatgaacaagaacatctgtgcttctctagaaacattataatctatggttgtgaacttgatattctagcccggtggtacccaaatttggctctacatcctcacctactcacctaagggagttttggaatctgttgtcagagagcttcccaggtgatcttgaagcccaaaaaagttttgggaatcagactgtgtctcatgaagtatggtcacaggattcccgcattggaatcacttgtaatgagtgctagaaatgcacggtcctgggctctgtccaggcctactgaatcagaatctgtagtggggacctggaaggtactcgttagctaggagttatcaatgtcttaaacattttgtagggagattgaaccagggatttccaggtttacctgaattctagatttagggcgttatggaagaggtgttaacaattgcagtacttaattctttggaaagtttaagtttaaagtgctgtcccctcttcagcattggtctctgagttaattcctagctttcagaactagacatgttgagtttacgtcactaggctgtgtccttactgatctgatatgttgctgaaagcacgtgtgcgagcatgtgtgtgtgtgtgtgtttaagtgtaattaggtttttgaaactccagggtagattgttctttcactgttatttttcctttcttctaaaagaatggctagaggagtagttggtggaagacctcaggtaatgagtatttcaccattactctcagttgtttgaggtaggtcttgtactgacctcatcagctgctaactagaaactttgacaaaaggggaaaaaacaaaaacccaaatataaattccagagggcccaaagagatgttgattacctctgagtaggtagtgccttgcatgataaggctcctgccatgccccagcacgccttagggctagtatcttaaaatattttttattaatatgagtgttcttagctaggtttatcttgtgtctctgcttgctgagaattttacagctagttttgatccttctttattctatcaaaataatgtgatttccaaactattttaatggcataggattctcttctttttaaacaaatacaatcttagctcctcaggattgaaacagataagtggtattttattagactaatgggaaccttcaaatttaatagcacttatttcctatgagtcaatcacagtgaacacaaagctgttttgatgaacattaatttgaaaatgtgattttgtatgtcagttacagttgtacagtgagcatgtgaaatgtccatagtatcaagagatcaagaattctgattcttgcagaccagtagttggaaacagcagggtggttgggtgggtggtaacttaataaacacctcactttgcaaactctgtatgctatttaattagaaagatggcagaaaggttgtgtgtgttcttaggtctgtaggaaaggagatgcctgcacaggggtaaatgctttggtccgcagtgcgttaactgtggaatacagtacatttgaatctatttttagattttagtgcccaagtttgtataaaatgaaatttgtgtcaagtttgtggaacctctatttttggaacatctctcataggcaaaaggtaatggagaaactttatttatatcttcattgatgtatctttaaacttaattattttttcattatatcttgtttctttgccaaaggtcttgcagtcatttaaaaaatttggtgttatcactgtagaagcttcatataaaattttggagaaagtctttaacatttattcttctaggttcactttttacttgaacctgggtatttttatagaacaattttcagtgtcagccttgattagtttagtggaaagattacaggatgatgaaactagaaatttgtaacattttaagaaatcaaatacagtacagttctttatcattgttaggaaaaacaacttctgtcctcttttgtttagtacctggggacttggaaattaattggagaaatggcacacaatttttgctcgtattttgtgtttgggagttgacagaaaagtattataaaactaaagtggtcagggttggggggcttatataccattttaacaaaggaaaggtttggactttgcggaataggaaatcatggggaagcgttcagaaaatatgtaggggtaagtaatgacaagataagggcacttttaacaaggttggtttatacagaactgtatgcataaacaatctgatgttgactgtctcaagtaatgagtcgcttacttctgaactggtacaggacagagagacatcttcccatgggaaatttatactctgcttttagggagaaaaggggagggcagagaactcatcttgcatctgttgacttcttattttcctcagcctaaaataatacttgatgccagccaggcgcagtgattcatgcctgtattctcagcactttggaaggccaatgcaggcgaatcaccggaggtcaggaattcaagaccaaccatggccaacatggtgaaaccctgattgtactgaaaatagaaaaattagccaggtgtggtggtgctgcacgcctgtagtcccaggtactcacaaggctgaggtgggagaattgcttgaacccaggaggcagaggttgcagtgaactgagatcgtgccaccgcacttgcatttcagcctgtgtgacagagcaagactccatttcacaaaaaaataataaaaaaaaaaaacttaatgccaaagtggaatattttggggtggcaaatctggaccttttcaccattcagtaagttaattcccagttaacatctcttcataaatcaaagagctgcttctttagataacctgtggtaatgaagcctttaatggctagttgctaggatgaagaaacatctatttgaggatacagaaaagtatgaaacaatattcttctctagtaattcattaatcatccagatttgtttctctgatttcctgatattgatatttgtgttacttggtattttgttccgttagaataaaatgtaaaaaaaaatatgtgtcactcccacgagacagttatacagttttccaacagctgtcttagagtgtttactgggaaaataaagttgaacctatggtgtaaatgaggtttaggagttttgattttgtgctttcctagcccttatcagaggaacttttagaatagccgtatttgccttaccagtagattaggaatagtcttcagtaacctttctctttgttgctttgctggtttgatagaaaacacaaactttgtaaacatattcaaattcatagaaaataaaattacagttgaaattctcttgtaacatttgcccctttataattcagcataagagtgcacgtgtgctgtttgctattccagaccttttctggggggtagtctttgtttactttgcatcaggagattggtggtatagaagagacaccattctcaatttaagcgcttgtcgtaggaatgatggaaaatgtcgatgaggaagatggtgaactaaaatggaaatagttcagttagaagataaaaaacagttaaattgtgatatgaacttgttgcttcttttttttgtagtttatagaattttaaaattctgtttctttggtatgaaaatgatttataccccccatttttatgatgtagtacaaaatcaacctgtttttgacagttttcattctatttcactaccttaactatgacacagctttggccaccagccttttattttttttttaactttgtttaaattcagaatagaccgaagcacttttattctgtacctgttggaacatttcctttcaaatattcctgaacagaatagttgattattggagctaaaactgtgcttcaaaatttgccaacttcttttgagcttgttctaagttaattgactttcagctgagtacactgctgctactgaacgttgagagctgtggaaaccctcagagtgtgcttttccagctcaaaaggtcaactttaacagatattttctggcattttatttgagtgtcattcgatttgtcaggtctatacagtggcttaattagcatgttttagtccttaaggtatttgttttggctctttaaagttttagattgtcaatatttcaaaacccttggatgccccttttattggtgttgggaaatgtaatcaaatattttttgaggggctgtaaatcacagagtagcatttgctgctctaagtgttgtgaagaaacagattcgcagttaaaaccatcttttcagactccactcagtaatttctgacaccatatatcatctttatgtaatcgaggggtgatcattctgtattgttctaaattagaacaaagatttaccttatgcctcctttaagggggaaaaaagcaagacagaagtatttaagctgtgtttataagagttccttggctgggtatggtggctcatgcctgtaattccagcactttgggaggccaaggtgggcagatcatctgacatcaggagatcaaggccagcctggccaacatggtgaaaccccgtctctactaaaaatacaaaaattagctagacttggtgctgggtgcctgtaatcccagctcttcaggaggctgagacaggagaatcgcttcaacccgggaggcggaggttgcagtgagccactgcactccagcctggatgacagagggagactctatctcaaaaaaaaaaaacaaaaaaaagtttcttaagtggtagtaggatttactaaacccctgtgtacactaggtttgttacttagtttgggatcaagttcttgggattaagtttgaatcaaaatacctttgcttcctcctgctagggaggtggcctactggacactaatcttagagcttttagcttagaacattgttacacttgggttccaattccagcctagccactcaatttgtgttgtgtcctgtgtgtgctttttgactctgaacgtcagtttctttcataaagtacctagcacacaggggtactgtctctctttcctgtcctcttcttaccagttaatacccattcagttacgtgacagttgcagacttttgtttttccccccataggtaaaaagtagtttttgaaaaacatcttgaagtagatctgttgtcctagatttcttggagtttgtcatgatgtgggaagaatgcaaagctcatcctccatcctttgctttctaggtgatttgaccaacataattgattttccaggggtggaacaaagtaagaatagaaagtgcgaggcaggacttgggagcccagaatgatgattaatgatattacaccagcctttatgaactagagcaccggagtgtggaattattgctctatgtggtattgtgtgaatgtttcagaatgaattagcttgacttaaaatatgaaggtgctctcaagtgagctttccagtgagctattactgggctttcgaaggtcagcaagttgttaaattgagccatgaagtgttggttagataaaaaccaactgcggcttatttttacttttattgacatcatcttccttaagatgagtatccgtttaatataaaacgtaaatactatactaaatagtctcattttatcaaagatgatgttcaagtctagatatacagagacctgtgttttgggatgttcaaaaacctaatattcctgcagtgttagcagatcagaaggctgaggaaaaaaattactatccctttgttttcttttccattgaaatattcattgaaaacatctaaagcatttcttcattcagtcatcacagactttacagatttcagtttgtgtgtatgggggagggggcagtttccatgagggtatggttaacttagcagatgcaattttacatcttgttttccttttttgttaaatccttatgcatattgtgaattagagtttatttttagctcttaatgagttcttttctcatcattgtactttttgttggaactctgttttgtacatactgctttgattttgtagggaaaatgtgtatggcgtacaagtcctgtatccaccacccccaactcccatcctctagctcaacaaaaatttgcatttcttggtgagggatgatagacttgaatgtttattaccttgtagagtagatctgatggggcccttgactctttacaacctgtttgacctttggacttaatactgagaaagtcaaatcctccttttaaagtaaagtttaagggaggcatagctgtgtgtaaactggtaaatcagaatcactgcactgtttttaaggtcactggagcctgagagaacagttttatttcctcacattttaatgctttaaatccagtcttaaggagttgcctccaagggtactgtcgtacgaatcctttttcctaaccctggtactaagtaagccatgggagcttttttcattccatttaaatgaattgtagtttgctcttattctactttaaatgtatctaaacattttgaatataaatgagagactgatggtgtatcaaatcaattgacatcttctcatgtagacaagggctctcctaaatgacttcccaaatcctgcctctaaaattgtcttttttttcttttgtgaacctgagtattaggttagctctttttaaacatggtgccaagtgattttgccattatatggtgcagacagtgtactaccttctcaagtagaatgatttgggatctaatatcttaaaatctaacaatgttataccaggtttgtttttagacctttatattctttattatttgttgtcctttttttatgggggtaagcccttttatacatattggaataggattaaaatacagaattgttaataccgatttgttactgtgttttatatcaatatgtgtatttttttaagtgctggaaattgggagcctttgcaaaaaggcgtgataacattccattatatccccagctctagaacatacaaagctagtcctgatgtgctacttaaaagtagaatatggaatcttctggggttagtttcttactctatttgatattttagttctctgaatgcttatagaaaacaatatatttggatatagccatcaaagtaaggaggatgtctaatattctttcctagcctttatagttggacaaccgacttttaaagagtcttttttttttttttccttttttaagacagtacccttggaggccactgtgttcatgaccagtgactccttgagactgggtttattaaatggacctgttagtatagtgaataacagctcttaggtaattttgcgtagttgttagtaggcaccaaaggaggaagggtgagcgttagttgctctatagattataatgaaagaaggtctcaggccagatcccaccacacatagaaacctctatctagcaagcaggaccaaattgatggagaagccttttctgaaagcttggtaaagtcccacttctctcttcttttttaagtgctttgaacacactttaaatgaaatgttcaccggaggctaacaatatcccaaaagtcacgttctgcaccctcactttgcatcatgcaaaaagaaatccctttaaacaaagactgaaacccaggaccatttaacatttaggggttctctccataaagatataaccaccttggattatgccaccttggattttgtgccctgtttatacgaaggtgggaagtgtctctaaactaatttagcccatctgcgtatcttgaactcctttaattttaccggtaagactccatttctaacactcgttatgctaattaacaaataactggcttacagaacaaaaccctattttgacatccattaggtgaatcagcagagaattggttgttgatttaggtatggatagtatgtaggcttacactagtcacttgaattttagcctacttgtattatactagttaactaatcctggattgtgcattaatgatagtatgttagatgaccacccagaattaaagcttaaatggctggtgcacacgtgtcatcagattaattctaaactttaaaaagaaatgtttttattgtggcaaaatataacataaaatttatcatttgaaccttttcaagtttacagttcagtgacattaagcacattcacagtattatgcagccgtcacccttatccatttccagtaccttgtcatcatcccagatagaaactctgtaaccatcaaacagtaactcctcacccacctcctttgctcccagcctttggtaaccattatattttctgtgtctctatgaatttgcctattctcggtaccccatataaatgaaatcatacaacatttgatataccaaagtattttgaaagtaaattatgataattgttttcaggagatactagtttttttccccttgggctgtagactcttctgtatgttttatttctcttcctctccaagtggctttagggaccaacccctccccctgaaataagtagcctggcttcaaatttagttcatgccacattccccgtaaaagaaacgtccaattaaaatactgaatttgtgcaatattttgccagattgctgactacttgcagggacttcatcttaccccctttgcagttgttctgcctggtttcaagcttgttttattcttttgaaaattgccttcaatctcttatcactccccatcttggcaagttacctggaggaagaggcagttggtgtatgtacagtgggtcagaaagaagaacccaagtagttttgctccctggaagtcttctctgccttcatacttttctactcttttctcccagagagtcagagcatccagggacaaacatccgtgtggggtcttgggacacaggacacagtgtgtaacatccccagactacttctcgttacctcacttcattctctgctgagcacttgaaggaaatcttggcagaaagccattcctcaatcagagtcaaagagcgacgagttagaaattctcttctgtagttttagttcttccatttttttctcccccttccctagtactctttccccctacccctcaaggaagccccccatcaatataacagtcaaccacccaaccagaaacccacaggacagagccatttcttttttttagaccactggaacaattattgtagttagagaaaacttaaatatctttctgaagcaaccttgggagacagatgctgatgtatgttgaagctagagaggcaggtggtttgtggcctatttctgcctttgcattatttcagattctgttactgagtagaacagtcctttttttaaaaaaaaaaatttaggtcttatatcttggcctcctgccttctctgttggcatcagccaaatgcatgttggctgcaagtacatcattccacacttagtgactggatttattttcagacgttggctattgacaactgaaaagcaatttcctgtgttggggcttaacagaaagcctcccctgggttgtaagagtttaaaataatgaaaaaggtgaatacttcatgggtaagtcttaatgcaagctttgtgtagacttatccccactgcctactttgcactcatgtttgtagggagtttccaaaagcctctgattgagatgaggaaggtcttctacctctggagctgtaaggtcttgtcttgattaaagatgactcaagcttaaccagttgttcagtagtctttgtctgagctttgggtgtgctggagaatatcagccagtgttaagttcttgatttcaagtggtgactatctgttgaagagagcctgtgccatgaaataccgtagtcctcccattatcaacagtttcgctttctgcagtttagttaactggtggtcaaccatagtgttaaaatattaaatggaaaatcccagaaataaacaatccataagttttgagttgctcaccattcagagtatcgtgattaaattttgcaccttcctgcccaggatgtgaatcatccctttgtccacattatccatggctggtacatgttccctgtcctttaatcacttagaatccatcttaacagatcggaaaaaaaaaagtagtgtatattatgttggattcagtactatctgtggtttcagttatccactgagggtcttgtaacccccaaggataaggtagggggtggaggactactgtactcggctagtggaacttcttgtggtatacctcatggttcaagggaggtagagaaggagggaattgtcatactgtgaaggtggaatgcaggatgttctaaattggtgcttgttttgttgagcgaagatgtaaagtatagtctggtccactaatgatttgttgattatttcatttgatgattaatattggatgcagtcatttatttgaacagaaatgagagaggcttttttttttttttttctttttcagtttacatggaaagacttctaaggatgttcgtggatccaagacaaacttgtctcagtcttacatttcattagggtccttctgtattggggaattctctttcttagtatattgctgatgggaaaaagctaattccagaagccagttgggtgggtcctctctctttctgcctgcctataggcaagcagccagtaaggaaccgaagtaaagtcaattaggcattttatctcaggacctagggtctcaaggaagtgatagaaggataagatggtgatgatgactcacctctctgttctgaggtgggggtagttttacttcctactacttaactccttgaagtctggttcccagcccttactcattctgaaaacgctctgtgactcttccagtgtgtttctttgtgccagttaggtagagtcagtgtacaatctagaactccattgaaacaatatttatgtaattcatattttttatctttttctatcagtgttttttaactcaaaagtaagcttattaattttgtattggtctcaatttgacctataagagaataacttttgtaattggttagaagcccctgttgtgaacttgccatagctattggtaaaggagtttgttttgagaggtgtgtatgtatgtatgcatattttgtaaataaagtcacttgtcagtgcctttcaaacaatttactcatatttgtgtcactttgttagtgttggaggaaagcaaagtttgaatttaattttgaaaatagtaggtgcagtgaagataccgatcctcccttccaagtcatctcttgtgacttcctcccccttttgattatgtttcttgggcactactttgctcactgagtgtgagcaagaacaacctgaagaatgactgagatgactactagcagtagcattcacacagcaggtctttttgaatgtttcatctctagcttttagtcttcagaggtcagtaatgtttggtgactcccattgcttttagtagctaaggagagccatatatcttgtggtaaaacagatttgcctctgaatgacctacatttatctcctctgcttatttagtggtcatttctttaaaacccttcagttaacgcttttggtttccagccatgtagggacatgtgtatgcttacaggcattatatttctgtgtcctatgggataagtagtatatgtcatcattaggtttttggacagtctttggttctccttgaaaagatgcaagtctagttttacctttattacagtatgttttttttcccagcaagtaagtcattgatggtgaattgtaaatgtaattgttcaaaaaagaatctagtcaattttgtgttcttctttgcaacctattaagatgtttgtgtacacctaaaggatttgaatgggatatctgttcaggtagcttaaagtgaaaagatggtggtgggtagggcaggggaatgacctggccaagataataccaggttatagaggattacacagaaaatctttgtataatatcttaatttggctgtagattatacattcagaaaacattcttctttggggattgtaaaaatctaccatagttcctggttatttgatttgtattttatttgtttcttgagacagagtcttgctctgtcactgcccaggatggagtgtggtggtgtgatcacagctcactgaagcctcaagctcccaagctcaagtgatcttcccaccttggcctcccgagtagctgggaccgcagacatgtgccattatgcccagctaatttatatattttgtagagacaggttctccctattgttgcctaggctagtcttgagctcctgagcttaagtgatcctctagcctcagactcccgaagtgctggtatttgggagccactgtgcccagcctgtttttttggtttgtttatttttaaaagaatttttttgcttcattttctttaagtcatagattacaatgacagagagtgcaaatgaaggaacaaattagctttgtagggaataatgaggtaaaagttctaattcctttactattagatttaattattatttttatttttattttttttcgtggggggtgcgcgagaaggataaagaagcccaaaatagtatagtaggcttttgtgttaagatccatttcagtatatatatgttttcttgctagaaagtactcttgcttgagaaaaataaagtttataatctaagtagaatccttaataatgttgttgtcaattaggataactagaataagcacttaataggttatattctgtttgggtacaggggctagtaagtgatctggcagcatacatatttaaagtttttccctgaataaaggagattagtttataatatataactattttattccttcattagaaatagcaaggaagaagttttcagcaacaaaataggaaaactcttgacagcataggctattgaatattggaatgagctgaaaaactagttatttagtaaaacattcatttcttcgagtggtgtacttgtaattgaatacctaacattttgtatggcattctacattgtaggaacctcttttaacaagagtgattctaacacgcacatcagaatctatttgtgaaacttaaggtggagacggtagaataataggtgggggcgagcatcagagagtacctttagtgcagtttcttttcccacagatgagatcccaatctcaaattcataaggctagttagctggaggccttaaactcctaacctccttttccttagggacccctttgtggtaataagatggattcttctgatccacttgtcttagccttaatcttaaaatgtgtttgccaagtgggcatgtaatgtggcccaaatagctgagaagctctgtgtatagaagttacttcccacatcagatggtccttcatattgtttaatctggtgccataaaaacatagcgccttccccaagagtgggtctcagatatgtgaataagcaaatcgagtaacttcagtaacagcagattaaagaaagcatcacattaaaagtttttaagatgaattaaaattgaagtgttgttgaataagatttttttaaccctctaccctgttatacatttaagagtacttgagatgataaaatggtaatatgttaaaattatttttgtgtttaggtttttcctgtttcataggaaagatgtatccagaattagcagcaatggtcagatgtactaagttgctgggtatatgatttagatagttcgtttttaatatactttaaagtcagtggtaaaagacaagacaagcctctgtgctctgctcattcggcaggataatgcgtttactataccatgctgatgtggatggtgccacattacttttgtgtcctaatgaatcattgtctaggtaaaatctttttagcaaaatcttcctcaaagtatccgtgaattttaaatttggaggattacaatagctaatcacttcaacttttggatgaggtgatttgggaagaaatgcttatgtgtgatatgaatgtggcaatcgtaggagctgcaccattttgtacttctctttaggagccatctgttaattggtgggcaagttgccctgtggtctcagagtggtttgctgtagcataagctgtccctgagcaaaaacaaaattgatacttatttctgtcagggtacctctttgacttaattcgtagccatggttcccatctgacccatagcctttacaactttaaccatgtacagctcaatttcctctggggactgtgttccattaggattccttttctttattgcttcagagagagtgttcttgaggtttgtgaagctgtgtctgtagtatttaaataggtttcctttatactcagcatttatacccccaccagcccaaacaccatcagtctgttttggaatttttcctaagcatgtaaaaatcagtgctgtgtgtgactattttaagtttagaggaaagaaagaaaaatgttcctcctaccctcttgattaactacctcttcattaactataaactaagcaacatgtcctgtacaaagagaagaaaaatcacgttatttatacttaatccttgtgtcgactggggacgatggatgtcctttggaaatttacttcctttgtctttgctaaaaatacctctaatttaattctgctctttctttttgatataaaaggaattacagtggacattttccccccggtggaagggttgtacatatcggtctatagcagatactttatgatcagtacacataaggtgaaatatgtttttattgaaacacctgatcatgtgatgctacccaatattcccttcttaatgactcagcttccctccctctttcactccttttctaacttgatgtcaccatattgtatgcgaaggacgtaggtatgtacgtgcattcacaaggcatgtgtaattttgcagttgctactcagttaaaaataaggtttgttaacacttgcagtagtttttccccatttactgtggtagttattaacactttgtccactcataatagcagcttagcttggtcggggggcagaaagaggattgaggtacttgtttttacagctgtgtaaaggaggtctcagaaaatcgtaagccctgcctgatgtagtcatcttgggtttagctttttggtggttggggttatccatatctgttagttttatagtgcaagaatactttcaaggctgctgagttggtgtgttgtattaatctctgggtattatggttcaaaaggtttcttgcccttctagttacttttacaaaggccagatgttatcatgccaaggaagtatggatcctcctgggacacaaggagttgctaggtttcaatcctggccattactctagaaggcctgtaaccgaacccaggttcagctgcttgccacttgaaagccagaacacaagaggcaaggattggtggaaggaaaagcatttttaatgggagccagcaaactgagaagatggcaaactagtattctaaagtaccatcttcaatttaaaaatttaccgtagggctttcaaagggagaaaggtatgggagacgtgcagaagtggtgcaggatctgtgtgtcttgttcagtggctctctcaggtgtctgaaggtctaattggcattatcttgactttggctcagtggtggtggactaattatgactcctcctaatcatgaggattttgcagtggggactctgttcctggtttgtttcaagattagcctgtgggatttcttaagagcctaagtagataagcatggattgcctaagggggagtgtctagagagggaaggaataaagagttgagaggggagggaagaaggaaaaagaatgtgggtgatttctaacactgaggtccctagttacagtcttacatctgcatctgctcagtgattataccaggccactaaggtgactgtccctgggtccctcgtgtgcctccttcctcattgtgcctcagtgcttggtgcatcctgcagtttgtctgctgtaaaccttcacatgggccagtcttgcttccaggatggggggtcggtttgcttacctctacatagatgccttacgttcagcgtagtatgcttttggcttgtctcttttatacttctttacaaatttgttcttctccatgttcctattaccttaatttgtttgtcaggaaacacctgaatttcatcttctctgttttgacacactaaagagttctctttttcaagctggtcctggttaagcctgaaacccctgcgatgcactttatgtatttcatgttcattaggtgcctgcctctctcccttgtttactgtgttgggcttaaaatttttgagcatcttagagggcagagaccatgtggtattgatcccatcttttttccaccgctatgaaatcatgctatgcgtatgaaagcattttaatgcaatctgctgaggagagaaatgtcttgtgtgggagaccgttttggcagtagcaaacatgtttggctttagccataagaactgctttctgagtttggaaaaggagtatgtaaatcaaggcccattttaaatggatctttttataatgcagatacctctcatctatctgttttgtaatgatggatttgttttgggggcttaagtggtttgtgcacctgcaggatgtccttccttttctttcaggtcattttttttttctttcacagatagtctcttggatggattaagaaagaattgaagttccagtcaatttatttcatgacaaagaacaagaaaaaaatacagatgtatttggagattataaatattctgattggaaagttgtaaactttggatgtacaggattctgccacaaagtaatttccacacatggccaaaggcaacaaagtgtacacttttgaaagactgagtttggaaaggttgattgtagtgtggaaacccagctgctcctttgagctagctgtgtgtgcccttgagcaagttaacttagcatctttgaacctccaactttatgtccgtaaaatggatacagatgtatttacatgtagccttgtggtgagaattaaatgtgatatatgtaatgtaaggatcctagttgcttgatagtttagtttggcagtggtactgttgactgccagacaggtagacatagcatttatggggcagtgggaatgggcatttttccccgacaaacttactgactttttcatactggaaggtttgggctggtgaacctttaacttttgggtgagagagtgatttttttaagaaaaatgtgttcaagaagaaaatttatctctaacgagaatttttgtttcacatggacttggtgagtttgttagagtctaattttatagtttcccgttcttgacaaaatggggagctctccatggtggtttgcagggactctgacatagtttcaaaacagggcctttaaattttttgtttcttgtggtatctgagttaaaaaatgatcttgtacagagagaaaaacacattaagaagctgtactgcctcttgatggactgcttagtggggggggtgtgtgcgtgtgtgtgtgcaggcacaggcaagagtgcatgtttgtgaagattgacaccagctggtcgcacaagcaacagcagatgccctttttactaccacagttaacttgttttcctctaccacaatactattttgaggaatacagttcctttgccttcatcccaaatggtatatacttgaacaactccattgtcttttaagtaaacacaagataaagcagataatataagactgttagtgtgtgtgggggtgggggtaggggcggtggcggatctgtgtagaattaattataattaacaaagaaatgagaaagttgcagcatacccaaacttttaattgaaagtagattggactagcctagagttgttaatgtcctaaccttttttgaactgtcaggtatgactttcaggctatctgaaggtattttggcatttgctctatcctggtggcagctccagtgtttgaaggtagaactgctgacctatcttttagagaaactacctatatcaataagtgatgagaaccgccttttgttttcattgtggtgctgagcgtgctacactatctcagtcactttctttcaggctggagaacctgctttcaggtagagtctcatcctgtgggttgtagaggaattggtttattttcctactgcacataatttttcctcatcttcctggtcttggatgcaagatatctttgtgtacccggtgtaatacttggcaagaatttagaggatttaatatgctgtttctgttctcaatagtctaagactgaattgtgtgggagttcttaatgttgtctgaaaatgtgatatattaagaacccacagtatcgccaacttaagcagggtcatgccgcattgccagcagattcataattactgggactggaactacaggaaaatagagctctaccagttgcataatcaggggacagatatggctattaaaattaacttgaagggaaaatgccctggtgctgaggacattaaccgctctctctagaattaggctgcttaggtaatatttaccaaatgatcactatttgcagctttgatttcagcagaaaagttatgatttaaactcttctatattagctccatgtatctgtaaagtcctgaaaatcatttagaaactttggggcctttcagtctcaggccagctttattagcatttgggtggaagatgagtcttcgagtgagccatctgttttctgtattatgtgagtgtctaggttgaattctccatccttgtgataatccctggtaatgtcctttgggaagctggtagaaatgctcccagctttcaggaaggctggcttggactgtagtaataggatctcaccagtcctccatctcacaatttgatcttactcattagagggcagcaaggaagacctgtttaacttgacccaccttaacttgagtgtttaaatggaaggacctgctgcatctggcatgctacatttgaggagactcaggctaagtcaggaattaaaatgtggagaaaaacgtgactagagagaactgcatccctctgttctgagattctctcaaaccttttccctgctgtgtggtacccacatggttttgctgtgtatcagatctgagatattaagaaagctcctttgtgaagtctggtgcgagttgctttggtgccagagttgcagtgcacagcctgtctgaacagacacacataatgagtgcccaagaacagtaagtccatctgaagaaatacaatatatttgcaactttattgtgtgtttgagggaggagagagaaggatatcaggaggcaacagggtctttattaaaaacaaaaattttccccctttgtaacgaaaacttgtttttgcaaatcaaattatttgcttttttttgtcgttaaggcatgcagttttatgcaagagctgtgtttggaggaagcgaatctttccattttgctttttaaaagtattgcattattaaacctcaggttgcaagtcttccttgacagagaggaccatagtgacctgtttctgctaactgtgggatttgaaaaagattcacacggcttttattcttttatttcataaaacattactactgctgtaaatggaataatagatacacatcaatcagtgtagtcaccttttattgttgattcaactaccaggtttttacagaattcactctgcattttatttgacttgtacatgaatagtctcagcagacttaattatattagtgaaaaagtactttcaacaaaattatatgctgacatcccataattcatacttaccgatttgtggaacagatttatgtaaatctatcaaattactctagatgacactttttaaaattgagacttcatcttaatggtatttgtagaaatttttcgtatgaacaattttacatgaactatttaaaactcgtatgacttccttatgaaggcagaattactataacatttgagcatcttgtctccacaagttctgtaatccatctggtacaatgtagggacatgaggaacatgtttataagggcaactatctcctaaaccacaggctcctggaaggcagatgctgctgctccttcatttgtttttcattcagtcattcacagaacatttaatgatctgtcttagggtcctccttgtcaggaactatgttctgcttgcccttgctcagcagtctagtgagggagcatccaaatggaccccagacacacataacaaagataacggaataatataagaagctgtgggaggactagtcgagaggagcactgtacagtgtgcactggggatggggcaagttgtggcaggaaatgacttcagagagtctcaaaggatacatgggagttggctagttggagagctgtgttccagacatagagaactgaatgtgcattttagggtgtatgtgtaggagtggtggaagatgagcgaaagtagaagtgagcaaaaaactgacagtgactggaaaccagagtatggttagatttgtgttttaagaagttctcctggacaatgttttggtggaggatggctgtttttggaattaatgggagtctaagcaagggttgtcctattaggatagtgtagcagtgatcagggccagaataatagagaaccaatgctaacgcagacaaggggccgatttagctggtaggactggcagaacgtgatgcgggtgtggcagaacttgggctggaacgtcttgcacatcttcactgttagacttgagctagttccttcaagccttggatcaaatgttacctgcaggatagggcctgctctgaccattgtatttaaacagcagccctgctcctcccctccccactctcaccccctgctgcttttttctccttagctctattttcttctaataccctgtagaatgtgttcctgtcagaatataggctttatgagaaagatctttttctcctttgcattctcagggcctagcaaaaagtatggttcccatagttattgaatgcttattgtagatgagaaatttgtagggtgactcttgttttttttaaatacaaaattttattttccacaattttgtgttgagggtcttgtttaatattggttggataaagttaatatacttttaatcaagaattacggtagtctattgcctttacctttaaacctgagggggtaatttgatttttctgaacattggtagtaatttaaaatagaaaagactaaataaagtgacctttgaatgaaacaggtccagaagattgtgtatttttaattaaaatatgcaattaaaattttaattaaagtagggtattaaaacaatgtaggtggcaggggaatagctgatgctttgaattacacacagtttgggatatattgccatttactgtgtttcccacagtagcactttgccactaaacgggttttcttcctgttttcctctccttgctctgaaccctgctctcagtagtctttggtcctcttcagaggcctctggagtgcttcagctctgtggtatagatcccttgaccatgatttctaccagcctgtttataactgttctccttgtgccaggagcatcttataaactatttttctatctcttgtgaagaagggtttcttttctgtggcatgtatgttagattaaaaagaagcgtgtgaaacaaaaggcattcatacacaacagtgcagcacagaatatagcaaaagttctagaatccctaccaaggccattaaaatcaagactttgggccaggtacggtggctcacgcctgtaatcccagcacattgggaggccgaggttggcagatcagttgaagccaggagttcgagacgagcctggccaacgtggcgaaaccctgtctctactaaaaatacaaaaaaatagctgggtgtggtgatgcatgcctgtaatcccagctacttgggaggccgaggcagaagaatcgcttgaacccaggaggtggaagttgcagtgatccgagatcatgcccactgccatccagtctggatgacagagagagagaccttgcctcaaaagaagaaagatttgaattaatggtttgaaaattcttagaacacttgaccacaggtagcttctgagaatagctgaggacacgtggcattgagcctcttctttatgttcagttaccaggcaaattttttggcatttaaagacaggatttgtttttcttaagggcttttttttttttttttttttttgaagagccttagctttgtcattttggtcagaatagtcttttaatcatgttggtttccataatggttgtacttggaatttaaatgtagcatcttataaaactttttaaagaaatgaatcttagtttggggattatcagtatgcacattctaaattcagagagacttgaaaaataggtttggatgatatggataagtgatgcttggtttccaagccttccctggtggcccatgacttactgatgaatataagagtgggaaaagggtaggtaaggtatttttttttgtaatgtttgccttgctactgcttttatttttaaaaactgtgcgctcatttataaccagaaatatgcactatataaataagatgcaatttatgttgtcataggaatgaataatggcactgaaattcatatatagtaaaactgatatttgtataaaaggtacagaagtttgagatagtaatcaaacaagaaacaacttttgcggtaaaagtgtcagaagtgcctggttacgttattattcaggcatattgggtacaaactagtcctgggcttatacgcaatatgcctgaagtctcagttcaggtataaactagttaattgagtggagtagagcacagcatttgaaagtcctgacttcaagtcctgactttactacttcctccctgcctttttgatttgtagaagctgattgaccttgccaagcttcagatatcatttctaccttgtaggagaagaatctgaataccgaacatggttaatgtgaagctacaattaaacagtaaaataccatgtagctaaaaggtgagaatggggaggcttgcctatcttggtatcatctgcgatacccttaatatattttaaacatccaataaatatttgctgccttgattacagattttcactgtaaagtaatttaaagttctaactcccttttgttatagtgccaacattttaatacaccaacgatggtaggtttaggaatgcagtcttttaatagcagataccccctttcatattattttgcttaggataataatacagttttgcttacctcaaacatattctgagtggcactcatcctaataatgccactaggcaaataagaaactttttataaggaggcaaagtcatttggggataaatatttctgagtataaacaacttaacagatactagatatttgactgactcatatagctagtcatgattgcttgagggtatcaggtggaagacccatttgatggttgggtcttctgatggtggtggtggtgatgatgataatacctttggttaaataaataacatcagtaagtttctcattctttcatttagcaaatgtttccatgcctacagcaggccaggagtaagggttcagaggctagagtgggaaacagctaagtaggaagtaagcaagacaggcttttcactttacccagtgatctaatctcagtaggcactcttgtgccccagacagacctcaggaggccaataaactgtttctttgaagtaataggtaacttgaagattttagaagaaacacatccacgtgtacctaaacaacgcaactgtgaaacagcagtcatccctgcaagacctttcttagacctcccagcagccccgttgtagccccagctaggttctcaccattaaggcagtgatttctcaacatggtggttgtacgttagtcaccaggattttaaaaagctagtaccaatgcttcatgacagactgataaaatcagagcccaaggtgggaggatcgcttgagtccaggagttcaagcatggcccagccaatgtagtgagatctcatctcatatacacatatatatacagacacaaacacacatatatgtatatatatctatctatttttgggagtgggattcggggatcaggtttttttgttttagttttttttttttttttttttaagctttctagatgattccattgcagtcaagtttgagaatgcactggggttagaagctgctaagatgcaggaggaggagtatctatcagtagaaagggcaattagactatgctgatacaattgatttattttgtcatagaatagcagtatgacaaaactatatttgtattgcccttttctttttctgttatatttgtggcatcttttttatttaactttaaatgaatatacttaaaatctttaacagtaagcatgttattttttctcatgttatcttttgactagggtgacgatccactttcatcattaatgaatattttcatcattgcatcagcaacctagttgggtaggaattaccctcgttttagagagaaggaagctgtggttcagagaggtgttaagtagcttcttcaaagttgcacagctaactgcgagccagtaaacaccagagccggtattggaagtctgtctttccactataagctggttccttgagcagattttgttacattcagccaatttaattctactcaatgacaataggactgcaacacattttcataagaggggcacaatgcatgcagtaaacacatgataaattttgaattaatgaaaagctgaatgcttaaaaatacagtggcttcacatgtgactctttactagaactgtaaaataaaacctcaattttagtgtgagatgaaattaacctaattagtttttagctctctattcctttctcttttttaaaaaggaaaaaatacattttgatagaggacatatattagcagtgattatccaaaattctgattgtggtcccaaaatataatcactagttttcatattgggcactgtatttagccttctcttttcgtttatgtggtaacaagtatccacattaggataaccagagtagctgtcctaaaaacccacattgataaccacttgcacctacggtgccccatcaagaaaaaatacctcacttccctatgaaattgatgcaacagtagtacttagtaaaagcatttggaccgtccttgggcatctgggaaatcgtcatttagtttgttttgacttttgtagactaaacttttcttatgccatttttgtcacctgtataatgtttcttgccatttcaaactgagaaacttgcttcattgaaaagttgagaccattgcgattgactttagttatctttgcattccattgatgcaactgcttttgatagctcccattgtctgagatctagggcatcagtgaaccaggagtgagagggctcagatgatggggggagggtggcaacaacaacaaacacttagaagcaacttttactctagactttttttctcctgttatttttgtttatgttctatttcttcttttcctatatgttctcattgtcttcgatgtcatccctgtaagtcttttgtgttcatattttcctgttcttatctagatcataaaaccctctttggagaaatttgattgagtgtatttgaagataagccctcgtctaaaataaacttacatgtatacacgcccacacatggttcttcaccattttagactccgacattattgtacttggtaaaggctgtaaatatgtcagggtacaatttactgaacactgacagattcttggttgatgttttctgtcttcccatttttatggctaaggaaactgaagctgaaaaggtattgcctgttaagccctctccatagcacagagatttatccccacagtttatgaagctgaccttgtcttgctgatggtatactctggctcaggcagggcatggatggtggaatcctttggggatgtgtgttttttttttcctaaacagcactgcttgctgagttctaaaacttgaaaatgtagtagacaggagacataaagacttcatgtatatttctagaattaatagagagttctttttactgttgaggaaatatgctggtgttaatgacaagaccatatgccaaaatgaaagttgatctctgtcaacagtatagaactaatatatgcctttttccccttccttttcattagggcagagcttgggatatggctttgtgaactacattgaccccaaggatgcagagaaagctatcaacaccctgaatggattgagacttcaaaccaaaacaataaaagtatgtttaaagtttttttatatctacttgcggaacagaagtttaaaaaaattaagatttatttgtagttctttcctttcttccttttgggcccatataaacagttacctgggagacatagtggaattttggtgtttgttgcaagatggaagaaactgtttgttcaagagtgctatgtataatcattcatgtattcgcaaagggggacagagcaacaactctcttagataaatgttataggaagcctacggaatcaagtctccttcccttatagagaattacttgccctataacttgaggaaaccttagacttgttcttctataaaggtctgggtagtgaataagcaaggttttgcgagccatgcattctgtcacaacttctcaactctgcctttatagtatgaaagcagtaatagccactacataaacaaatggatgcagccgttatccaataaaactttatttatgggcaatgaaacttgagattgataagatgtttatgtattacaaatattctttttattttttccaagttaaaaaatgtaaaaaccattcttagctcatgggttatacaaaaaggtggcaggctagatgtggtgcttgagttgtagtttgctctagctaattcagcttgctttgaggagactgactggaggaacttacatgacacaggttattttttctgttgtttttctttttaagacgtacagtaaataactttgtacatactttgctgcttttgtgaatctttgaaattcttatgtagattctctcttgagagggagctaatctaattcacagcatagatttcttttcctttagaaaataagagggatgtcgcctctagcaaattcttagttagctgtaccatcaatttgccctctcctgcccagtgcagacattgccagtcaatcatggcactctttctcacagagtctagatgtggctcccaaatatttttttcaaaatagtgttccagacaacttctatcaattgactcaagtttgaacctattttccacccttgatttaagaaaccagctcagactatagcctgaagtggtgaggggaagttagtcaaggctgactgtagtatccatcttgcttagagacttgtgtaaaagatttttgctcatttttttcaggtatctggaaatgaagtgtcatttttgtgctttaaagttgcttttcttagaattaccagttaaggtaatttattagccctgagtggttttgacacatcagtctttatatttattggcccctaagaaaaatgcctaccagccctgtcttatctaaatgaaagtatatagtggttcccaaatatactagggtatgagaggtccaagaattctagatacttcttgagcaagaaactgttctatgaaaagattcaccaatcagaaaatgaactggttactgtatattatcaaaatgtgaagggaaaaatgagatttccaataaagtgtaagacaagtttgttttgaagttttttcagtctgaactgctttttctcgttatctatatttctctgcatactttctgtgtcagagatcttttactagtactattaagtaacaataagtgttctttaaaaagacatccagtgttcagttaccgtcagaccgtgtgctctttatcctacagcagatttttgcaggtttcttttcctcaatttatattgatttccagcgttgctgctaatttgtcctagttctgaggtcctgagttgtagttgggaagaaaatggaataggtggtcaagatggcttgtcccaggaactatccttttctccattctagaaataattacccttatttcattctagtgtgtcagttcttttactaaatatcctcctgcacgaagatccagaagaaggtagaaatgcaggggaaataggtctccacaggagaaatgcccgtggccttcaaggagacagttgatgacagctgcttccttactgttcatcatccagccttttctctttagggcccagctgcttgggctgaatatgtggaagaaagcacagtaaagctttgtggcttttatagtgtgacatcagtttctgattttctgagatgtgggtcagggtaatgggcaaatagcaggctacttctttccccgcccctatttggttcctgtaaaaatatcagataacagctggcatcctcaatttggcccacatttgtctaagaggcaaagcagaccatttcccacaagtatatagcaccccctttgcctgtttgttctttctatgtttatttatttccattagacagattttgtgctcttgtacaatgtcttgagccaagtttttctagtattcacagctttaagaatgttttggaagttgagttaagccttttcatttcctgggatactattccataaataagtctttttccctcgtctaatctatactggtgatggctgtcagcaccactttcttacacagcaccactttactcgtgttactgctcactcaaaactctatggtgtttctctactgttttaccctatcatctggctgagttttgtaggagtgatgccagtgctattgccgttctccactgttctcagactggctctttacttgtaagctgatcttactcccagcgtccatgcatatgcttttgcagctccgactttttggtataccctttcacactcatttttagtttaactgtggtcatctcatcttttggagcccatctaaaggaattctgtccttcagcttctgtctttccaggttgttccagctcctgctgagttcccccttctttgaagtctatattctttacccttgaggaaccacagaagttttggaattacagggggacccatatgtaatttaggcttaagcactgttctctgtccacagtcagagtggagatcttggtggtcatacaatttagccaagaccaggcagttgaagaaagagctgcgactcaaacaaatccttgtcttctgatcgttatatcaaaactcttgccaggacactgtgctttactttagaaaggtacagaagattggttagtatatacaagtgtttgtgtactccaagccacttagaatttagtatgcgtttggtaaaattcctggttattgggatattgaaacagtgaatcaagtgctgtgaaaggtggtttatttagcagtttctcctggggctccctaatagcattagctcagtagggttttgtgcagtagttggtgtgttgaataaatgacagatgttcagtatttccatggtgagtgaagtgaagtccctcaggctctgtgaggacctaaagcatttgttcccaaactttggttgcatcttaatcccaagggaagtgagttagaaatacagtttctgggatccactgtagatctactcgatccctgtccacaggtgagattccgggttctgttttttattatgcttcccaggtaatttatgacagcaagtctaaggcctagcacttgggaatcaccaaagatgtttggcggttctctatacatttggtatttgtgtgtgcaaagttcagtttgtcttctagcattttaccttaataatcctcctgtggttcattctgttaaccaaaatattaatgttttttcttgagcatgctgggcgatcgtttagcattcagagttcaacgtggttcaccagcctttgcttataaaaaaacatggcatagaaattgaaaacaacgtatccgtctcatagtaggatgctgtttgtttaagtagtagcagatacaggttaaagtctcgagatacttgttctcttgtcctaaaggtcactttttttcctggttaaggagatgtcccagaggcataccttgctggtgaaatgacatcatccctgtactgcatgggaggcagctattttgggttaagcctgcccacagtatccccagtgttgacatggtaaataaagtgtgaatattacaaaaatgttttaagattctcattagggaaggtagtgaaaaggtgatatgtgtacagttcaggcatgggggtgggggagtaatctcatggaagtgtcaagttgtatgctggtgagaagaagagaggtttttctccaagatccttcaggtccctaaaggaatccttcctttggtgagttattcatgaagtgagtggttgtacctactgtgttcagtcttcatgctctttctctactcattttatttttaggggtcttaagtattgaaaaaaatctaaatagtatgtggaatttttatggcttaaagccaatacttttgacttgttaggttaacggtgtcagacttaaattcatgattagcaaactaaaatcattcatttccaagaatatgtgtagacttcctccctcctctgcataaagaactctggataggtgattatcacataacacagtgaaatggatacgtggctcccagcatctctctcagcttttccctcctctacaatgggcctaggatgctttatttttcctgaaactggggttgatttatctggaaagaaggagctgttatctcagggaatagaatgttttattgttattggtaagttctgacccctcaaaagaaaaaaaaattctgtctagaattaactaccatagaaaaactgcccgattttggtcttgattaaagaaatattttccttaatcattcagctatagaccaggctaaaatttacctttgcttaaaagttattaattggtatacaatcatgaaatttcttatactgaaataaaccacaatttaaccacatttggaaaattctattataaaaatgagaatattataaatagtattatctattttttgtgttcagtttgagagtgattaagcaaacctaagaaacctgtattctaagctactgtattgccattaactttttgttaaatttatacctttttctaactagcttatcctttcctcattagtaaatgtcatatttatacttttttttttctgttcagcatgagcttgacccttaacataggaatatagaactacatttctgaaatcttactctgtctaaattaccttactaaaatgatttaactggctgcttaatcttggacagagcttttaaccatttaagtttccatttatatcgttaaaataatttattcatcactgagaattttcattacctgctttttaggagaggaaaaaaagcttttcatggtctgctaagttgcatattaagaagaaatgttaactttttaaacaaattcatgtttattgcataaaatgatttgatgaaaagcagcaacctctcctgaagagagaataattttaattgccttcttctttcactcttgaaagtttaatagccactgtaaactttatatggggatttgagtttctagttcaacctccttttgcgacaggattattgggattgggttggtttttctttatcattataatttgttcttttataaaagttaatactggccagaaggaaatattcttagatgctgtgtaaaccagcccccactgtaaagaaggaggagagggtatgcaggcaggaatgtaagtaaagctacgctaagggcttgccacccagtaggtcctctgttaaaatacctgcagcacagttctgtgtttgagacgagtggctctaatagccataatgctgggagttcatgactttagtagggcatggaagttttaaagcagttgataggggaaccatatagaatttgcccaaaaagaaagcaggatgggaggcgagtgtgggaaatgagcctgagttatgcgttatagaagtgtgttctgggtgcgcatgtatgtgaaggcgctgatgttttgttctctaggtgaggaaggggcaccggagggttttgagcagagtagtgttgggattgaccttgagtatttattcggagaggaaggtttgttttgtatttaaacgccacatctttctcagcatttcaacccaccctagtgtttttctggcttgtgtagtttgttatttcctgtgatggtacaaagggtagaaatttataaatcatcgtctacaaagtacccctcatttaaaaacctttaccttgagcagatttggaaaatttagaagtaatagttggaagaacaggcctcaaattaactgacctacttatgagatgttagcctaataactgttatttatccagacaaaaaaaaaattgaaaaagtatatgccaggagtggggtaaaaattgaaacgttgagtaaattgttcctctgccttttaaaaaatacagactgaccgagtacatgttttcctaacttcattgttaacttgtattctggaaatttccacagccacatgtcaagttttaacagtatattacatctgattatcagcacctcttcaatacatttaaataaaatgcttctatctatattgagtcccatttacatagtccttatttgaagtgagaagtcacagatgacttttttattgttatttgtataatgcccttcatgtgttttgtagaatgctctcttgtcagctttaatttttttcatacaaaaagcccagaaatttcttactcatctaatgtggtctagggaatgtgggtaggtagcccaagtaaggtccagagcttgaatgtcctgtcctcaggcctcttgtgttacttctgttccttttagccaactccaaagtgagagttaattggaattctcaaagggcaataactaggcattcttccaatggatttcctttagattttcccacagttgttggagcagaggcagagcctacaaagagggaaggatgaggaacagggttcttggtggcagtgtcccctgcttacttcctgcctgtcagccacacagtggatagtgatggtagaagagtctcaacagttgactgaacccatctttattggaattgatggatcattttgttacctaagcatgctccacaggggtatcatagcccctcatggcagatgcttaaacttatgcaaagtatggtctataccagaaaagcctggctatttcatttctgtaaccagcatggagaatgtcaggttttatgaagacctccattggaattaaaagagtaactgcctccttgtgagtattgcttctgtgtaaggtagggggaaagccacagaagtaataacttgtataggtttaggaaattgttgctgtctgtgtgtgtgtgcacgtgtggaattgaaaggggcatgtggtggggatgtcactgaaacttactgtttatcagaaatttgagtcattgaggcagaacccttataacagctcacaggtctagaatgttaagtgcaaaattggtttccgaataataaggaggctgaggaagagattcaagcaaaccatgtgcatcatgatagaagacactgaaaatagttgaaccacatgttcaaatgtgtttgagtttgatttctaagataacagtgagataagataaattgaaactgatctggatggccaaaaatcttttcttttttttttttaaattattattatgctttaagttttagggtacatgtgcacaatgtgcaggtcagttacatatgtatacatgtgccatgctggtgtgctgcacccattaactggtcattcagcattaggtatatctcctaatgctatccctcccccgtccccacaacagtccccagggtgtgttgttccccttcctgtgtccgtgtgttctcattgttcagttcccacctatgagtgagaacatgcggtgtttggttttttgtccttgtgatagtttactgagaatgatgatttccaatttcatccatgtccctacaaaggacatgaactcatcattttttatggctgcatagtattccatggtgtatatgtgccacattttcttaatccagtctatcattgttggacatttgggttggttccaagtctttgctattgtgaatagtgccgcaataaacataccagaatctacaatgaactcaaacaaatttacaagaagaaaacaaaaatcttttctacctgaacatcacactgctagcccttgttgctttactttcccactgctttttaaggggaatgtggggtagggcttttctttcatttatcacctgggaaaagtggtgctaggtcagtttggcttcagtctgttctaccacatacctggcttgtgaagttaagatgattgtgttaacttcccaagaaggagcccttaattctttgctgtatctacttttgaaacaaatttcataggactattatctttttactgttttgaattcgtgcagaaacagcagtagtctctggtaggcaaatacttaatccctttgatgaaataaagctcaggttaaaagggatttgttcaaaatgaaatagctaataagcatcagaaatgtagtatcatgttggctgatgccgtagcttttgttgttttctttccatttcacattattgatgttaaactgttttgctcagataccactctaaataaaccaactgagagaggccttaatttgggcctttgagtgtctttgtcttgagactttctggaccagatctcttaggtgccagagagtggagctgtctttgcctaggagtgaagaactctgccctcttgcagagtgagcacttgagacagccagacgtacagtttgagaagaaaactggatctggaggtcatacttagcagataagtgagttaacattgattcagttatttcagttgtaatgaacagtaaaattattattatagtagtaacttcctgaaattattttttaggcagctacgcattcttcgacaatgtttttctggtaggttcatgtaagtcgtagatgctagtttaaaggttacagaaatgtgtgttaacattggtctctctttaaatttgcgtagactctttaaaaaagcatggatggtgcattttcttttattttcacttctgccagccattcctatcattacttttagtgtgtgttctcacccgcatgtactacattagaattacttgtggatgttttatttccagaagtgtcttgacatgctgcttttgggcaatgagacagagctgtacagttgacacttgaacaattcgggggctatgggtagcagcccccatatagcaaaaagtctaacttttgactcctcaaaaacctaactactagtagcctactgttgactagaagccttactgataacataaacagttatcacatattttgtatgtttcatgtattacatattatgtgttattacaatataaagtaagctagagaaaagaaaaggttaagagaatcataaggtagacaaaatatatttactgttcattaagtggaagtggatcatcataaggatccttcccccttgtcatgtttatgttgagtaggcagaggaagagggaggggttggtctaaaatcccatattaagtgcacccacacagttcaaacccatattgttccagggtcatctgtattttgaaaacagtacaggaaatctgatacttgcctgcctcctctcccttccttctgtgaagaactcttttgaatgctgcaataggacttggaggtgtaagtcttggatttgtgttctgttcttggtttcttgatcaggtgagctgcaggaagggcaaggaaaaatagaacaagcatgtagtcctggaaactaataattcagaaaaagtttcagtttctagttttggttgttaaatgtctatctagaaatttgtgcttgccttaaccaaataaccatattcatattcctagaaagagtcattgagagaagctcctaacttcatagaatcaagcacagtggcctttttgaagaggctaacccagttgagccacatccagccagtctgggttcttggaaatatctttggatgagtttcatgggctttattttacgtctgcatttttgcatttgcaggtgatttatattcctaaatgctttgctttcaagctacctggcatttgtcttatttagaaactaacgatcagtggatggcaaggaaaagggcttggcatccgtggttgttatgagctatctaggaaaccctaatatgcccagagttttgaggattatttcaaatgcctttacacaagagactgccaacactttaatgtttatcaggatcagtggggtggggtggttgattaaaaatgcagatttctacaccccaaccaggacttactgaatctgattatctgcagagagagactgaggaaattgtatttcaacagccaccacaggtgattcttaagcagatggtggcctgacctgagaaacactgttcagtggatcttaatgatttgcacttgggtaggtctgtggtgcttattttaaaacaagtctacttgtaaaaaataggattttcatttgtcggttacatcaagatatgttgaatggctgggattcactaatgtgtttttaatgaatatagtgctggatttacctaagaaataatgcacgttctcacacacaatttgctcattttcagggcatttgtgtgtcattaaatacttcaacattacaattatgctagcataatttatttgcttctgagggtatttggagaattttcagtatggttctttagggcctatccatttaaaatgggtgtcttggccaggcacagtggttcatacctgtaatcccagcactttgggaggctgaggtgggcagtcagaagttcaggatcagcttggccgccaacatgacgaaaccccatctctactaaaaagtacaaaaattagccgaacatggtggcgggtgcctgtgatcccagctactccggaggctgaggcagggagaattacttgaacttgggaggcggaggttgctgtgagccgagattacaccactgcaccctagcctgggtggatagagggagattctgtctcaaaaaaaaaaggtgaaagggtgtcttatagagattgggagttaagttttgaaagtggcttttgagccaggcgcggtggctcacgcctgtaatcccagcactttgggaggctgaggcgggtggatcacctgaggtccggagtttgagatcagcgtggacaatgtagtgaaaccacgtctctacttaaaatacaaaaaattagctgggtttggtagcaggtgcctgtaaacccagctactggggaggctgaggcaggagaatcccttgaacccgggaggcggaagttgcagtaagctgagatcacaccattatactccaacctgagcaacaagagcaaaactcccatctcaaaaaaaaaaaaaaaaaagtggcttttaaaatttaataaaaatttgtcttatttttatagcctgccaaccaaacccctcttccttccctacccagtgtcttgatatttgagctttctagccagggcctcaataaatgggaatttgctctattataagagcttccacacattttatgctataattttttaaaggaaaaaattttttgctatatgcaaacttaatttagaaacccttttgacctgtaaaccaaatgttgccccaaagctatgtgaaagcagtgcatactcttgccaaaaggcttacagtgttttccccctgctcagagttgcaaaaatgaattaataagaaaccaaggatttttcttcatgttcttcattaagcaatgtctgaggggaattgtaaaatatgcattgtctacagtatatgtatatcctggtgcacaaagtcagatgaactgtgaaggtgaggggtaaaaacacccctctcacctttgtactttgttctttggagtattaaagaacatttatctgccaagtggcaaaggggatactatttggcggtttaattacagccagtgagtgttattgatgctatcagtcagcaagacccagggaaagggcctggtaccaaatcattcagtgtaattaaatatctcaggacgggattctcaaggtgcttctggagatctgaagcaggagaacactttgtcttagaacaaagataaaggtggtagttcccctcctcgctgcccctctttaaatttctgcaggtgttgcatagatggcaatgatatggtctctttattgcgtacagtgaaggttgtccatgttttccttaaaaactctttcttttaaaatcttcacaactgtcacacaaagggttttgggaatacagtaattattttttgttaaagctgttagggggaatatacagctcaggtgtctaatagatacttggagaatgaaggattgtctttgaatgagactattagtcttgcaaatcagttcatttaaaaaaagctttccctatggttattctctaatgtctaatcatgttgtgagagaaatatcttggtagacttaaagtcataaaacaacactcactaatgtttcaggggttatccccttatgtattgaataaatttttcatagttgcataacttatgtcagccccacaaaatatgtgtaggtaaaacttcctttggctctgtggggagggcttttaataacatttctgttattctttttccttgctttctcctttatcatacgtgccttacacaaatttccatctctgcctgttaaatgccataagcaatctgcagtgtttgctgttactgctttttaaatttttaaaaaactggtacagtttctactgattgaggattaccaaagacaggctgcccttgaaagaaagtgagctggcttcctaacttctttgtgtatgtatacctgtatacatacattagatccctgataattgtgtcaaatcagggcccaaaacactaaatcttggatagcgtatggtttacttgtaatgtagatagggcttgcagattgtgttttaaatttaaaacaggtgtttaaatggggattgttgacataaaacatcctttaagaggaagattatttgttaggaatttttctctgggtgtttgaggaatcctatttttaaaatacgttaaagatttagtagaagtagttactttatgttcaagacttcccaccccttagggctttattatattatatggaaccataacaagactaataggcctgtctccaagtttgtaggaaaggtcagtagctttaaaagatgtgcatggtgctcaccttgcccacaaaacaaagggccaggataagcaaatgtaaaagtttttgagaagtatttaattgcaagttgtttttttgttttactgagaccatgtaatcttggctatacagtgttggacagggagtatctgtaattaaatattttataaacattttgagtgcttaatgtgggctagttagctttgctaaatgtttgaacagcattaaaataagacaagaggtagccttgtccttgatgtcattgtgtagtaagggagacagcacttagtttatatgaccattatttggatatatgatgagtaagtgcagaatacaatgaaaatggatatgccacttgctgtctagaggcctctgtgttgatttcagagttgatggtgttttacaagctaggttttattgggcggaaaaagaagaaatgtattacacataagggaatgtctcattcaaaagcacagaggccttcacgtgatgtgtaccttttaggagaagcttacatctgaacaccataaagtatacttattctatcaagtaataaccttctacaaaaatgattggcaggaaaatttgattaaacctagccctgtactttacatttatccccctttagtgaggacctaatttataagagaaacaataggaatgaattttgggtggatcaagtaatttgctcgtagaaacatatttgccttgctctgcaaagatccgtggagacccatgggactcatttaagtatttacaaatggtatcaagatgaagtttctctaagcagtatttagtgtacacacagaggaaaggatcattatattttcattactatatgaagtaggtcaaagaagacttgggtttctgaacattgttgcaaagcagtttttcttctagttatagtacaaagggaaacttaactgtagatggcatttacatttaactttactaccacactgattttgactgttctcctcacctgcgttatgatgggaaactgtctctgtattctccttccatacatttctgtctgataatacttaccaacatttagattgtcattcctctgctcataaaagttttgccctgacattcaaggtctctagactctgccctcaactcactgttctagtgttgtcagtgtcctacagaaatctttattctggctcagctgggctcttcatcattcagtatggaagcctaattctccattgccttggattattctctgcctacatggccctctaaccctgtcattgataaagttttatttggccataaaataaattaataaagtggataaaaatttcttaactatacatttcctttctcatctatttggtggtctgctctctgagggcaacgggatttttgtctttggagagcagcttgcagaatgtttttatttataacctctgcatgaggaagcttctgtctattgcttataagagacagtgaagacctgctctgtgtgctcaaagacgaaaaaagtcacagtttaagtgaaattaaaagttgagattcttggaggtttttcgttttgttttgtttttgttttaatgccatttttaactttgggtgtgtttttcaaaacttgttggtaggtgtcactatacattgaagatgtggtcggatgaaggatatgtaaaggacttaacagcttttttgtttcatacaaaaacaaagtttttttatatatacatatttttaaaattatactttaagttctagggtacatgtgcacaacgtgcaggtttgttatatatgtatacatgtgccatgttggtgtgctgcacccattaactcatcatttacattaggtatatctcctaatgctatccctcccccctcccccaacccgacaacaggccccggtgtgtgatgttccccaccctgtgtccaagtgttctcattgttcacttcccacctatgagtgagaacatgtggtgaaaaacaaagatttaagtaaaggtatcccgttatgtgagattttctacataatgtccacctacccgtctcttgtcttatccacttctccttttcatgtacttctctctgtcagatcatggatgaagaagtgtatgaaagtcctaggatgtttaattcaccaaaattggcttgatgagaaccttttttcttttttcacattaccaaccggtactggttgttttttattctaagacacctgcagtttatttatgccagccagtgtgtagtccttctttagtttaacattctaactcagcattttaatctgttgacagtgtcttaggcatactagacattcagatactacacaaattatatcttaagtacatttttggagataaagttgccatggttatcttgatagtattggcatctgttcgagatgtcattgggtcaagtttcagaatcttgaaagaatactgaagccattgctggagaatgggcttctaacaattgaatgaatatatctgattttctgcaagccaatttagcctgcgttgttttcagtgaagcagcaaaagccaagttatttgggcaaatgccacaacttctaatcatcttgcttgagaggtacttcagaacaacctcctagctgggcgtggtggctcacgcctgtaatcccagcgctttgggaggccgagacgggcggctcacgaggtcaggagatcaagaccattctggctaacactgtgaaaccccgtctctacaaaaatacaacaaaattagccgggcgtggtggcgggcgcctgtgttcccagctactcgggaggctgaggcaggagaatggtgtgaacccgggaggtggagcttgcagtgagctgagatcgtgccactgcactccagagtgagactctgcctcaaaaaagaaaaacctcctgcacaaggccatggaatgtatacgttcaacaggtagtagagtccctacttggtgggtgggactatgtgagataggcatcatataagacttagtttcaaccctccctctagaagtataaaacatagtaatataaaagctttgaatggtaatactgttaacttgggaggaagctttgaggcagtctagttctctggccgtatttaagaaggctcaaaatactgagtactgactagtgagtactgagatttttcttttagtctctcgaatgtattcatagtatatttaatgaaaatgtctaaagtgaaagttttatagtggtacttgagagtgtagcctcttcagtattttttttttaactgggaaatcatattgaatcatcaggtggccgattgcatggtagcttgtaacacatttcacatgcagaaacatacccataaccttcatctcaagatagaagttattccatgaagttcatttatatttctactactgtctatccaaaagaatcgctcattttacgttttactggcttaggttcaacaggtctctacaaaagagaattgaggtagtgagaggtttaatatgtaacagcttgatgggagaaataaaattttggggccttaactgttggcccatttatagatgttgaatgtttgctctctgtatgtcagtaagacagctccttccttatgttccctccatccaggctgcaggcttcccagcacactcatctgctgtcatcttacaaaatatttggaatattcaggaattaactttaataattatcaccatggatttggaagaagcctcatttatatatgtgatttttgaactgtttctgtgttagagtgcatacattgttcttgtgccacgtctcctcctctgtgtcatctttcctgacctcaaagataatagtattccttgagtttttgttccataaattggggatgatgatgctgcataaacttattgggaggagcaattgaattaacatatgttacatatccagaacagtgtctggcacatggtaaacaataagtgttaggagctatcattatctgaattgtttcctatgtatgtatataaaatgatgttatgattaaaacatttatggttcctctgctctttgctaatagttttattgttgcatttaatacttgtaaggtttccatgaggtaagtactgtgattaacatcaaattacaaataaagagatagaagacctaaggaaatgattaactggtaagtaacagagccaagacctggacctagctctgtgtgactccataccatatgtttttactccttaacatgggagggttctggtccaaacattccatcctaacctctagtttcatagtatgctgtgtagtggccagaactttaccagttacagtgtattctcttctgctttgtataatatatttttgaacctggtgctaagctaacacgtgcttgcctcagttgcagcctattcacattacttagtatttataaatattatgtggctaaataaatgcaggctcatttctgaagttaaaagtaagggagttagcattcttaaccactactgacaattttctaatgcagagagctaccggtaggaatagactctttggtggttacgctaaaactcccatctattttttatactactttagtgtaatcaccttctaaagtctgaaaaggctaagtgaaatatacaggattggaaatggaacatggaacattttgattgacaagttcctgcttagacttggaatggctagcctactgccactaccatagtgaatttgatttcactgcctccacctcagatgccatatccactaccattgctcaattgttttattttctgttaagtatctctgcaggtaaaaaatttaagaaatggtaaggtatttatggcctaagttgcatttcaagaatatctttaccatgtatcccatttgcctttaccagtatgagatgtccttgttgaaccaacttcatactagaaccaaggagaaacaacaataaaagggcagaagttatgtaccagttgtactttactaaaaacgagatgcctgtcagggcagcctatttagaccctctttgatacacatggatgcaactgtttgggtagcatttaataaaccacactcagtgcagtgtagtttgtcagaggctgtttaagatgtgtgaaaaaggtggtctaatttgtgaagtctgtagttgatgatcagttgcttgatatacagttcttacagccaaaacactttttatttttctgtggctattcagtagatttattattgtctttaacaatgtcataggatcacttatttttatgacattacttatttattcctaggtcgcctttaagttgaagctaagatcaactgccttgactaatatttaatgatgttgcactaaaacttgaaaattctatgaaaatgagaatctcccctagtgtaaacagccagttgccattctgttttcctgttaattggtttgtaatcttataaaagggagagacactatcaaaaagattctagctattgtaggttggtacgttttaattggtggaaagtactagtctcaggattcttagtttgatttttctcttcaactcccaaataattagatttttttctccaacatctcctaaataattctcaggcattactagtagaagaattataataactgtcctaagacagtttttttgatgtgttttattatttccttatgtgtatacaagaaaatattctatgtagcaaagctaaggttcttattttctaggaatagctcttctgatgtctccttggaaatgtctgattattgtcccagtcactgtcatttcacaggaagattttatgattttgaagactgtgttgcagctaatgatgtaatggaaaatcccgtgatgaagagctaagaccgcgagtcctacacccaactctttttctttgtgtctttggaaaagttgcttcacctttctgtgcctcagtcttcctatttcccagatacaaagaaattggactaaatgatcactgtattttctttttgctccaaaattaagactccccccgccccacagcctcctatcagcaccatattactttgttgaagattgtgtcgcctctggggacttgaatccccaatttgagaaatgaaatttcatttttgaaatgattaatagaattttcattgtagtctgtacacaaagtaccaatgcgtataatgttgggtatatgacaaagattgtggcttctgttagcttttaaacagtatttcagaaataaactctcaatttaatatgtgattataaatcatcttcattacagtgagtgtgtggtagttaccaggatgtacaaagtaggatgatgacaaggtttcttatttcaaggggttaagtcagtcacaagaaagggttaagagataagtacattttggttaagtcagtatttaagaaaacaaggcatataatgcagtgtgggtgcaggtaagaggcacccaactcagactgtagtggagaggactgattagtgttgactttagggactaggtgatacccatgaggtgtctgaaatgactgaaatttagctgattggaaggagggcagcttatttttaacacagagaagtgagagcaggaagcttggaatactaccgaaggttttgtatacttgtatggaagaggtagccagtgctctgaccataaaggaataagaattctaaaatttatctgaaagtcttagggagccctttaggtaatttaagttgaggatgacattatcaaatatattccgtggtatctctgaacttctcacttgaattaaagcaattgtttagtcttaaaacattcaacaaatccagtcacgataaaatttaaggttctgtgtgtattttccactgatagttttctaaatcctatattttggaatatccgttaaagataactgccctaacctttaataccttttataaaatttcctgtttggatgtgattatttcttttagctctaactttgctggagctaatacttaatttcttattgttatcttaggcttattcattttcaacccattgtgaaatatgcccttccttattgaaaacttaatattggactgtgatacatgtatgccttgatgtgtgtttgagacttgttcctggtaggagtttgaatttagaagcagatcaaagtacacatcttccttttgggtgaattttgaggtctctggcctgagttgtggttagagatcccccttcttctgtgtactatacttctgagctcattttggaaggtccgatgtagccacctgtccaaatatccatgatgctgtcacaagacctttgctactgcttacttagagcctagagctaacttttattgagttatagtgtcatttttcagatagtcccacgaagactccatctttaaaaaatatgaacagcaattaactgtccgtttaaataggcataactgtgacctttcagctggagagattgaaaggagctttttgaaaaaagtctaaagtggcaagtgtctaattttcaggtttaatgtttgtagtcctgggtcagtaattgacaagtgataaaagttgttcagtggtgatcttagcagtgggtgacttctcaaatgtttttagtttaaaaaagagggaacttctttgttcatttatagaccttatcactttaatctattggtattaatgtccactgtcactgatctttccattgatgaatcagagaaacgagagcagttgtgtgtttggacgaaagcatttagagggacttctgatagtgatgcactgggattttaaacattgctatgtacatttaataaagtactaattcataagatggttttgtttctttgtataattttgatcaacttgtgtttgatagcccactcttagtgtatgtgttactcatctttgtatgtttaatgtatcattagttttagctgctgatgaagaaatgagcttttaattacaagtaatacactatatttcaaacggttccattttcaagacataattcaataaatatattctatctttattttgtctagtctagtcttgtttgtgaagaacagtttgagaagccatgggccatttacttacctgtagtagcaagtacttactgcctccccgtccctccccttccctcatataatctcagtattgcttgtctttgtttattatatcactcgtagcttttgtgagaaattccagaataaacctgagttttaaattgctatctttggagtagattggtgttcagtgttgtactccctgtatcatctttaaatatttaaattgcagactctctggctgcctcttaaattagatccttcacttagtagttttgacatttcataaccttgcttctcatgcattaaatattcacctgtttaagtggcagtgaaaatttaaaatccaaactcatatattaatccagcaaatggaaaatggagaacagattgcagtggagaaagaggctattttgacctcagtaggacatatgctggaagtccattgttttgaagcatttctaaatagaatttgtcatttaaagcgaactcttttgggccttcaagggagtttagtcttgtagaaccaaaaagatacttaacactttctgaaaatagcccctgtatgattctgtaggtgcatatgaaggcacctgtaagatctaaatccacaggaaaaaaaaaaaatcggaatggagaaggttgctggtaatggtcagatacaaaatttagtttggtaactgatttgatctccagagtgtgagtccttaggtaactgatctccagagtgtgagtccttatcccactatcagccttcttcccacttaggtctaaatacattttctatttataatctttttagatgaaagaagaaatgttttccaggaagggaggattttgatgacagcgatatccttgatagtggaagggaaaggaagctgttttaattccaagaacagtaaataaagggataggggtaggaccttgagccttggtctgggaggaaggagaaggcaattaccctttcttacacctttatttcctgaaagtgaacgaaaatggcattgcttactcctgagaattagaaagtaacaaaaattaatttaaaaattctaatgatgatgtgtagtttctttggttaattgtaattagtggccacttctcttttcttagaaaaaattactcttaaaaatattaatggagccgggcgtggtggctcatgcctgtaatcccagcactttgggaggccgaggtgggctgatcacctgaggtcaggcattcgagaccaggctgaccaacatggtgaaaccctgtctctaaaaaatacaaaaaaagccagtgtggtggtacatgcctgtaatcccagctacttggaaggctgaggcaggagaatagcttgaacccgggaggcagaggttacagtgagccgagatcacccactgcactccagcctgagcaacagagtgagactccgtctcaaaataataaaaagtggaataacttttaactaatttctagcaacatcctgttttctgtctgtggccagtttctctgtgtatgcctttaagaaacagccaggattcatttaatttttcccaactcagaacaagtgaactgaaacactcacttaccatagtattattgaaggaaaactggatgaggagaccaggacacagaaagagaaagatcagagtttgaacccagaattcaacactagttgtgtataaccttaggcatgttatttaccttgtctgtgcctgtttccccagctataaaatactaatatgtatgctgcctacctcatggggttgttgtgaggcacagacaaaatattgtagtttgtgaaaatgccttgtaaatggtgaagtctcataatgccctaaatgtaagtttaacattaaacattgttaccgacgtaagtttatatataatctaatcactcctgtcctgcctgtggtagtggaaaatggttctttgacaatgtcactgaaagatactgtttttgagaaggtttgtcttggagcctttttaatgtggctgggaactaaagatacaatataaactgaagagtggacattggggaaaaaaaaaatcacataactgacctaggtatgttttcaaagcctttatataagcattaaatataaacccattttcctaaatatattttaggatgacttttaagacacaccacctacactcatctgaattgcacaaagcagtgaatgtcactgcatgagtaaattgttctagaacactgtaatggacccaggtttctctctactttaaggggctgggcatttacctaaattttcagatgcatgtagaggtaaataatatttataatgtcacatagattaggctctgaagcttttcatgtggattagaaattatttaattattcctaatagccatataaagaaggtagaattgtggtaataggcttgaagaacttagttctaagttcacagaactggttatgaattaaacctagttttgagcccaggcacaccgattagctgttacctttaaccacatttccactgcctcctgtgacacttgatctcatgcagagcctgtcacctgctgctggttgcttgatcagtcattggaagttagcctccttggagaatgtgtagatgcctgccctggagcccatgggacatggctgttcataatgggagtacttcagtcacatgatctggaacagagtaacagctgacttgttgggtgctccctcctgtggaaaaaaaagccatagaatcctagatagggatgcacgtcccagctggtgaggtttcaccttttctggataattgagaatcttacacgagaaaagaaattaagttttcattgattcatattactgaatgcatatataattcattggccttgtttcatcagtttatagcaatcccaagatttgattccatctaagttacattaatcacttgaaattggccacttgttcttcacttacatttaagttccccagtcttcattgttcttaagtatttaggcatagagaaaacaaatagcgtatgaatagttatgtatgttttctccaccactattccaaattccttgtttcttctgtagaacaggacagtgctaatataacttccaaacatagcctttggaacaacaggtatattttcacttgttaatgagcaaacggtttgaataaagaagagtattaaatgttaacaccattggggcaggggtgtgaaagataacgaggtctttataaagtagtataaaatgtggcttatatttttttctggaaagccaagaaaaagtggcaacagagagctgtgggcacaattcaaattatggggaaaatgtttggtgcttcatactaaaagttatttaagtattagtgtaaattgggaaagtttgttgttaactggattaaaggtgggtaccaataataaaatgagcaggcagtagttatcactttacctcagcaaatcaatcccagacacattgaccatttttagtaataatctgaggatggcgtatattgtgaaatttctgtcccttgaagtaggctagtccagaatattacagctaaaccaaagggaatgcgatcaggaatagctcatgagactaaatgttggcaaagataggttataggcagagagtcatcaattacaattggggcaggagatctggatgacttgaactgacccttaaatgctctggttcagtaagccgttgtggatctgcatgatcaatggggtattattggatgggctttactcaccaaatgtgttagcatctatcacatgtcaggcactcactaggcattgaggatacagtgatgaccaagaatgatgtggtttcttccctcacagagtttacatgaggaatgatgattataaacaaatacatgcagacctattttgtctttcgtccttgtgggatttggtataccgtatctcaaagacatgaaactttttgaaagtacatacagtggcaggcaaagttaattatagggacttaagaccttttgaaaatcaaggttaaaaagacctgtggatgagaagacaacagacaaaggataatgagggcttgttcacacattcaaatttctgggaatttatggacaatcatacagcatatatcaaaagagcatacttactgataagggtgaatttttttttagaaatgtagcactaccacccacacagatgtgagaggctagaaaacaaaaatgttccatgaatttggaatctttaagcttagaatgattgggcctaaatccctattctagagcaggtgttcccaacccctggccatggacccataccagtccgtggcctgttaggaaccagtgcacacagccagaggtgagcagcaggtgagccagcattattgcccaagctccacctcctgtccgattagctgcagcattagattctcatcagggcacaaaccctattttgaactgcacatgcaaggaatctagattgtgcagtttttatgagaatctaatgcatcccccaccatggtccatggaaaaattgtcttccacaaaaccagtccctggtaccaaaaaggttggggaccactgctctaggggattggccccacagaagacagcctattattgtgaacagtactgtgctgtatgcaccactggtctgttttaagaactttaaattttagtgaattaaaactggactaaaggtgggtacaaatgataaaatgagcaggcagttgttgaatcactatacctccgcaaattgatcccagacccattgaccatttttagtaataatctggaggatgggatatattgtgaaatttctgtcccttgcagtaggctagtccagcatattacagatactcttccctgtccacctaggggagagggaatgggaatactactacccatttgtctagaattttcctggaaatgaataaagcagttagcacctgacttgcttgaacttcagtgttctatgctgttcatgggaaagttaccgaggcagtttttgagtttctaaagggaggtgggtgagtgagcatgcatatacatttaattttattttccttttccaggtttcctatgctcgcccaagttcagcttctatcagagatgcaaatttatatgtcagcggacttccaaaaacaatgacccagaaggagttggaacagcttttttcacaatatggacgcattattacttctcgtattcttgtcgaccaggtcactggtaagtagacagccactccggacagtctttccctgtctctgactagcagattgtgaaatattctgtctttccatgtagcagtcttgcttctagaacatatcaaaggtatatgtgggccagaaaatgcaattttctgctggaattgttcataaatatgcatggataaaaatagattgtggagtatagtgagcgtgcttgagtcatttccaccctgaaggtgcaggattgaagcctgtttcatggcttgtaataaatttatagatgctataatcttcatttccaagccactgtgtgataaaagcccccatcctgcttatagagtactaataaacaacctttcttttgtcaaaaagcgaagtttaatgcagcggtatgcagctagttctccaagggaggattacactacatccacactggtaattgctgttcaggctgttttccaggttcatgctgtgctgtatgggcatatgtaagagtttgaaattttgaatgttaaaaatttattttattcctaatatcactgttagcccaactgaaatgggaagactaaaatgttcattaaaactcttgaatgtaagggagttgttctgccaaatcttagttaacaaagctatagcaatatagatttgattatgaattttaaaaataaaatacagatacaattttctattataaaagcaatacttggccaggcacagtggctcatgcctataatccaagcactttgggaggccaaggagggcggatcacctgaggctgggagttcaagaccagcgtgaccaacatagagaagccccatctctactaaaaatacaaaattagctgggtgtgatggcgcatgcctgtaatcccaggtactcaggaggctgaggcaggagaatcacttgaaccccagaggcggaggtcacggtgagctgagatcatgccattgcactccagcctgggcaatgggcaacaagagcaaaactccatttcaaaaaataagtaaaaaataaaatgaaagcaatacttgttctttaggaaacagttaaaaaatagagaaacattgtgaggaggaaatattagctgtagtaccatagactgaagcagccacatgaagatttgtgaggttgtttttgtttgtttttttaaggtagcttttctcctcactgtttgtttctctccccgccacccgtataataataataccttggaggcatgttgtatattacaatgtctaattcttttaaagcagtgacttcagaagaaaattgagccagatttttcattcatcaagtgaagatccatttagttgatctgaatctaatcagaggagcccatattacctgcctctgtgttgttaattggcttcataggaagcaccacctttagagttctgagtagagagagctagcactacatgcatgcctgggagaatagcctacagattttgctgtcatgagactatttagtcaagtgagagtatataaaatacagcctccttaattgtgttagttaattcataatacttatacattgccaccctgtgttgttatcacatagactaataatggtgttaaatagaaatccaggcctagaaataaagatgaatttgttcaaagcaacaaaaatattttttatttcatttgtgctttctaattcattcattctgagatcttgtgaattgagagtaggtttcacctatgacacaaagtgcgtctcatcttttacctgctagtccatcacaggtggacctagcttgttttagtcagcggttctcaagtatgtcccgcacctgcagtatcagcagtcttctggaaccctgctaaaaatgcaaattattgggcttcattcagaacctactgaataaatctctgagggtgagccacaggttgttcttaggtatgcttaagtaggaggaccaccgatttaggtgactctagctgtgtagaggctgttttttttttttttttttttttttttttttgctaatctgatgcttttctaatggaacagctaaattctagaggttattaattcttaataggcgctagtagataagtgaaaggatttgctatcatttcactatttattcttcatacttaaggctttcaaagtgaacttactcaatttacctgaaatgaaaaatgaaaccctgcaattttcttattcagccatcaggtggtaataatgtgcaatgcatgctctttaaatagaaaaggtaaagtgataggggctgtcttagatacgcatatgtggaaaaaatgctttgtctacattagaaaattcttagtcattgaccttacacagtattaattttaaagcaagtagaccttctttctttttttttttttaagctcctccaagtatgatggtccagtgctcatttacttgccaaaaaaaatttccctgccactgcttatctcatgatgaccagctgtggtcaccccactagcctgttcacgctaattaaatggaataagctgggtttccctctacaatttttcataacctggaaaggttcttggctatcctttcccatttgtgtctttcacactggggagaatgtggggcagggagtgatcttctgtagtcaggagtgatgctgctgaggtcagaaagctttgatgctttacttctagaaatttatttatttttaaaatctacgtcttttctttttctccatataatatttttctgtaataaaatatagctagtcagaagcacaagagagcttcagagaactggaagagcattttcaggcatttttttcctaaaggacctatatcctatgcaatattattaagctgaatatattatttaaaatttcaaccgaaatgtctttctaccacagtgtatgtatttttagcatagctttgtagcatttttagcaaattcttctttctgttctccttgtttcaaggacaggaactactgtgtccctcatttctgagctgcttatccaatagcacaaattgaaaaatggaactccggtacactattgacattaaaagagtgtacgggagggaggtgggagagagagaaaacatggacatgcttgtgttttcttgtcttagctgattggaatgcatgtgataatgggtactcagattatgtaagtgacacgaatttttctaaaaatgcaaaattgtgattctaaactgaatggctagtaagtaaaggggaaagtttcctcctggtgtgattttgtgggaaatgttatatgtaggtgaaaacatgttcttgagaaggaaaaattaatgtgtcctttcttctctccttcccttctccttctgttccctcttttccaaatctttactcaaatctaccataggcatatcaaggggtgtagggtttattcgatttgacaagcgaattgaggcagaagaagctatcaaaggcctaaatggccagaaacctcccggtgccacggagccaatcactgtaaagtttgctaataacccaagccaaaaaaccaatcaggccatcctttcccagctgtaccagtctccaaacagaaggtatccaggaccgctagctcagcaggcacagcgttttaggtaagtctggtttggttcttgtgcccagctactaaactgaaagagaatactcaggtttactgtccagtacttttattgacaggatctctggtttgcttttgtcagtgttgttggttttattactattaatttttcatctccatgggcacagagagaatctacttgaggaatagtgtcttttgctaatattgaaggtggggaccaaaggacagtaacctacagcagtgattcttaaccaagggtgatttttgcctcccagggaacatttggcaatgtctagaggtattcatgttggcacaacctgtgggggtgctactagcatgtaatgctagaggtcggggatgctgctaagctcctacagtgtacagcatagccccagcaaccagaagttacctggtccaaagcaccaataatgctgtggttgagaaattctaatctgtagctttctggggttatctgaattgtttccagggcttcagatttccttttttttttttcttaaaggattttattctcatgtgtcaatttttaggtcaagctgtttctgttacttcactttatagtatgtgcaccattaagggtatataacctatgtgactacgtgaagtttctacaaatgagttcctctcttccttttcaaaattgtttacaaacaggttggcagactttctctgtacagtaccagatagtaaatatttaactttatgggttatggtcactgttgcatctgtcttgtttttgtttttaaacaacctgttaaaaatgtaaaagccattcttagcttatagcccatacagcaacaggtgggaggcagtctccatttggcctgtcggttgtaatttactgacctctctgtagttcatagaatgaccgtggctttagcccaaagaagacactctatctcactgacaggtgtacatatgctaactgtttaagttttattctgatcctgggataacaaaccaggagtcattcaaaaaatctctaatctgcatgtgagaagaacagtgactttaagaagttaagcagagcagagagtttttggtttcataagcaagtcatgcagtttttattttccaggacatttttaaatatcctttttggccatatggtacactatacccagaatgctatctaaccccacactgatttttaaaaattatttccaagtgcatatcaattttatttatttcattcatgggacagaatagttaattaccaaaaatataatcacaaatataacctaataagatcaggagttatgttttctagcttaaatctatgcatttatttttttcattggaatatttgcagtgctgaagagagtggagataaaatcagttaaaaatagctccttttaaaaaaatactaaattatgttgcttgagatatgagaaggaaatttgttatgaatgccacattaaatttcaacttaagttggcctttgccgtgggagaagaggtggtactgtcaaaagcattgagccttgtacttcatgctctgctgtgaggaaaaggcattggtattaaaaaaaaaaaaaaaaaaaaaaaaaaaaaaaaaaaaaaaacctttgccacctttgacttcccatggtagtggtgatcagactagtgtgggagatgcgtggggctgcctgatgcttgcctttgtggagaaagaagtctcacaaagaaagccctttttcagctctgcacataggtttcctctgtgacatcttaagtgaataatatatgtataaatatacttttttaaattgcaaacgtaggatgaacaagcctgaaggaattttacaggtatttcctaggcagcttgtccagttaatttcagagctctttggggccttgaaaatgatctcgagtttagatagaacaaagttcttcataatgtattggttgatttttaacattgtgaagttataaaatgtttgctgttagtggaaagctatattagctactttttttttccagattgaagcaatgattttgtttgatagttattaagtaaaacaaagttcttggaatcaagattgaattcttaggaagattgagaagacaggatttgggagagtgcctgattattgaaatggcaaggcttgtaggtgactcaggtgctaggttgttgatgggtgtcagcccttaggtttacctagcctccatccctgcaggctctgtgctttttatttttggttgagtaaagctttacaggatgttcttatggtcaaatttaattatctttttctggcccattctgtgtttttatcttttagtaccatatgttatcattaacttgaaaattctttttccttcactcctatagaaagacattttggaagaagagaataagagattgtcagttgtaagggaaacttggtttcagaaaatgggagaaattgttattctctcttcagatttttaactgttgtcccattcaccccatttctcattcctcccatgatccctgtccagataataaaatatgaacgagttagtgtgctcagagatagtgtttgatctagattgggtgtgttggaagaaatcagatttcaggtttaacctgatgtttgatgcttttctttaatacagtatattgaacctggttgtcattatcttgatttccgccccactcccccttcttctttcacctgataaagaaacttgaattaagggcttgcttgttttgttggtattttgctgttttctgtagttcgagtctaaatcatcacacagatatattttgtccctgatatttgtgttttaatgctcttgccttgagtttttgtcacctttcagcagacatgtagaaaatttctcactgtatttttatgttctcatagtaccttgggagttgagagagattgagcaatataagttatatgtattatggtcaagaatacttttaataatcataaagtatgagccatatcttttatggtcaaaaagcttaaaaatccatgtaataagggttaagtttaaaggtgggtttgtgaggtttatggcttagtcaatctatgaataatcagagaattgttgtaatatgagcactgctggtctaatacgcttatttaattgactgcagttttcaaaataggacaagccttatttatttggatggatggtgtaattcaagccccttaagtatattcttgggacatgatatcagaattaaactttaagccaaattttttcatgttcttttctgtgaaacagctataattttattgaatatgatctagtgtaatgacctgtgtgcctgcttctatgagcctttatgcattttttaaaaagccttttaaatgagcacttgagttgcctttaaggcatgacgtactggttgcattatcacaatttccttttggaagaaaccggtatcaatccccttgaatacttttcctctttcttagaggacagatgataccatctaattgaataaggcagtaaggcagtaagaagatgatcttgttgtagataatttccaagcagttctcggttggcgctttggagagattttgataatcattatttgtgggattccgagtatattttcttacccatcaataacttatcttcctatttttatttctgactttaatcgggttcacatttccccttacttacatgtaggccttcccatagtccatcagctaatttttttagaaattaggcaggtactttatttttattttctacttatgaacacctagctttaaaataggaatgatctgatacatggttctgttcaaaattttgacaggttataattggagctttggtcctgttgatagaaaaatgtttatacacatctctctcctatgtgcctttttcataaattacatatgtacatgggcgtgtgctattcattaaattataaactctaatcaaacataaaaaaggataaagatgagacaatctgtattaaatgtcttgctaattactatactggttggcttcattttccatgtacctaatatcttaataaatgtcttttaaagcaagaccataaaataatttcagatatctcatctgacttcatgtgatgcatgttggattatcttgtgtctaaccttataatgtagcttgtactaagagtaggagaaataatcggctctccctttccttatttacttgtatttcccttactggtaccattctttactctgatttacatttgtagtaatctttttttaagttactttttctttaaatggaggtcattttaattaaagcaggttatccagtctaatcctccatatctgcttgctgtgttatttgtaaaatggattttgttcaggctaaagagcaggagagagtgccactcgccgcctctccccttcgatgattgctcagtcttcccccagggaggcaggtgatacacaggactgagaaggtactgggttcagtgcatctattaaatataagtaaaaaatactttattttaaatacatatttattttatattttattttaaatatatatttaatggatactttaatatttaccttccatatgtactacgttatcatccacacccctccctgagatattctggaggcagctagcttgctctccatttaaaaattgacttccatttataaatgaccataaataaaagatggctgggcgtggtggctcactcctgtaatcccagcactttgggaggccaaggcgggtggatcacgaggtcaggagatcgagaccatcatggctaaatggtgaaaccccgtctctactaaaaatacaaaaaaaattagccggacgtggtggttgggtgcctgtagtcccagctactcgagaggctggggccagagaatggtgtgaacccgggaggcagagtttgcagtgagccgagatcacgccactgcactccagcctgggtgacagagcgagacttcgtctcaaaaataaataaataaaataaaaagatgtccttgagcagtggacagacccagcagacatatttctaggggcttgttgtagtagtccttgtgtttgagctgctgcactattttctcttacaactgcctgtgttacagtttgccaactgctactggatttggagtgaatggtgcccatgtagagcacccgttgccttttctgagctcccatgggaaacatgaatctatggcaccgagaaagctaggaaatacttctgggctcagatgcatacagtcagggggcttcagcagtgcctgggcactgttttctaggttccatgcttctccctacactcgttggtgatggaggagaagaaagattagagtggataacttggcttagttccaaaggaccaatttttttctaaaatgagagagaagtgaaggaatcagtgaagatcatggtatcatgtaaaacttcacagatagggtaaaaaagatgccctatcataatttggagggtcctcggagatcctgttataaaaaattcgaaacctcctgtctggggatgccagagatggaagtgagggagatggaggatggaaaacgaaatgtttctccctcactgcatgtacagtcatgcatcacataacgtttcagttaatcacatgtacgaccgtggtaccataatatagtagactgcaaaaaattcctattgtctagtgatatcatagtcatcctaatattgtgcaatgcattaccttttctatgtttagatatggttaaatacacaatacttagcattgtgttagaattacctacagtattcagtacagtgacatgttatacaggtttgtagactgggagccatagcccataccatataactaggtgtgtggtaggctattaccatctaggtttgtataagtgcattctatgatcgtacaacaacgagatcacctagtgacacattttcagaacatatccccattgttaaaaaaggcctgacggtaattcacttcaggggcagatttggtttctaccctgtttgaaaattctgaaaactcatctgtctctgggccgtatgcttggtgtcctgagtgggtggtagcaaagcatgacctgtccctacatggatgcaattaatgggcatagatgatgtaacttttgagtgaattgataaggtgcctctgcattctgggtcttctagcactttggttggagacctcagtatgcggttctcttctacaggtagcatatgccaaatgcattctgtgttgatcattccagcaatttgataaaattgtattgttactttatgattggtggtgctaatatgtgtttgtctttattgctggtagttgtgatccttattcttgactataaaggcatggcatctttgactgtactcacctctgcaaaaaataaaaccccacatctttttacttatgtgcagacaaggtcatccaaccaatcctcttactagttttcattctggactaagttgaccataattttggtaacctcattgtctttatttggtcatcacatatttattataaactatcagtgaccctggcttgtgctcagtggtgcaatgagagggtggtgggtcaaggcacgcacacacacacacgcaccacgcacacagagacacactcacacacgaagatcttttgtcattgtgatctgttctgtttccttacactttgcataagctcagttcttctcatctttacaaaacagaattttcagtggagactgagggcagggatgtgggaggctatatatttccccattctgaaagaccagatgagatgtgttttggcttttacaaaactaaaaggtgttggcttttgcatgtatactttagcgtgacttgatgccacaggttaggtgataaggctgagacttttcaaacttacctttcacgggtgttaaagaaaaaattctcacccccacccccagtcccagagggacaaccctgggatgtctttggagagtgttgagcattgtagcagttgagggtggttgtggactatgtattaagttatgcctcctcctcagaacacataattagttggtaagcactgtggaaatttgggacattagagtggtgttttgaaactgataaagaagagtcaaatgctgtaaaactaatatttgatataggaaaaatgtagaaggttttaaagagtacttacacctccacccccacccctatttactttctataaacattttaagtgaggctcagattggcttgttttgtttcctacctggcctttgaaaactgagtaggacgacacttcctgtagcgtaatttgaatacagcatccagatcaggatctgaactcttggctttgttgcacactggagtgatggatttttcttttttccttctctagacctcagctgagcacatttgagaaatgggagggttagcttgggttgtccataaggttttttctacctgtaattatacctccttgattctaaaagatgaaagcccttcaaagttgggaaatgaaaggaaaatgtatagaattctgtaacctgcagagtttgagtatcaatgccataatttactagccctgtggtcttgagcaagccacttaaaccctgtgtgccttaggtatctgcaggcaccaacagagttgtgaaaatcaaaagtagtataaagaacatgtagctatacattgatcactttgaagctacctgatgagaaccctaaagttaactatcccagagctttcgcacttcctctctgaaaggtatcctcagatgaccgtcactgtgtcccatgtactgacccttgtagagagaaaccattcattggaagaactgtcctgtggcagtcggtgcccattagcttaaaaacgtaaaaagacccagcattctgagtcttcacatataatcagtgtacagatatcccctcggaagatggcagtaatgagcccaactttcttgaacatcaaggggaaaaattaaaaactgaagtttgctaaatgtgtgttttgcaggttggacaatctgctcaatatggcttatggagtaaagaggtaatgatagaggttcatgatactcataatccctttccacagttgattggtttctttgattttgggagtgctattcacacccctcataagtttttgttgggttttattttgcatgtgcaacctaatgaaaagctgctctttgaagcacaattgactcaagaaatttttataccaccggatgccacctggtcttttaaaaacccatcatttgtttcgtattgcgttacgacgttacagcatgtttacgtatgtgttgatcccttcccctgccaatcctgcttaattcatgaagccagttctaaatatatttctttgctattgtggatgatattcagtacagtgaataatggtcatttcataacttattaatatctcagtagtctagcatgtcactgcaaagccacacacagaccttggtcaaaacatgaaatagtttatatatttgttgggggaggagagttactaaaattcttggggatggaaaaggtatacgttcattgctataaccaacctctgtttttattttttgtgtgtatgtgtgtatttcctattctgtttagcaggttttctccaatgaccattgacggaatgaccagtttggctggaattaatatccctgggcaccctggaacagggtggtgtatatttgtgtacaacctggctcctgacgcagatgagagtatcctgtggcaaatgtttgggccttttggagctgtcaccaatgtgaaggtcatccgtgactttaacaccaataaatgcaaaggttttggatttgtgactatgacaaactatgatgaggctgccatggcgatagctagcctcaatggataccgtctgggagacagagtactgcaggtctcctttaagacaaacaaaacgcacaaagcctaatgagctcttgtcctcagtccatttatatatgaaaactatacaacaaaggcaagttaagagaaactttatacattagtaaatgtctttgtaagtcagtgttgagatggggataaaatgactacttagcatcctaagaaatatgtgagattttttattgctagtatttgaattaaaacttcttaaatatcttttatgtttgaatatggacaagaggtacagggtttttacctgtcacattgcattctattgccttctttgaagaaggtggaccttttaaagtgtttcagctaagggaagacatttcttttctttttacataactgccttgaacctgtgagtaaatattgaggctttgtgttgtaattcttcagttggttgtgtcttttttttcccccctttttttcctttttctgattagctttgtgtttggtttacatttaaagcattgctgttatgtctgtttaagaaaagtattttgaagtttacatttttatttatgaagtttaaaacagtatttattttgtaattatgatttgggttggggaagggggggctacattataaacgcttattgtaagaatactggagaacttttcgtaaagcagtaccttgccaaagagataagagcctctttgatgtgggtttaaaaaaagcatctatttttataaaaaagaaaatttggagaaactttttactggtcctggaacaaatattttgacttgaatactttgagaaatctcttcatatgacacctagtgagcttttaaaatttaccaggaaatttgcagcggttggaaaatttagaaagatttatggtgtagaaaatacttttgagatctttgtatgaaaggagtagaatcaatggggggaaacactgctggtttcatttttgtaatcaccagtggagcgtctgatcatcctggttattatgtgataggtggctcacattgatttgtgattttgaaacaaataaaaaaaatttacaaaagaatatataagagcaggcaagaaatttaaattaccgagagatgggggaaaaaatctgttcttcctaaagaaatcccttcagatagagctcatggtgtttagtgatgtacttgcagtattgtttgaagaattgttttgtcttaaggaaaaaagacgttgcacatgatttgtactgcagcaaatcagcaaaagtgatctgagttggatatatttgaaggtattttgaaagttacgttcaaggctaacacctgagctttgtgtaatgtaaataagaccttgtgtttatgaacctttcagctaatttaattttttttcccttacatgccaagtgatgttcaggttttgaatgtttttgtatcagttttttcctttgtaaatggcattaacattgttacttgaggtcttgcttaatcacttttgttgtcctgaggacttgaatttacagtgcatcagatttgttgcaaattttgtctgtagatagtctagcttcagctgtttatggtgatgctacattttggtttataaatatgtttgtggtataaaaaaatgagtataaccataggttttgaacaaatttccttacatttttcatacaaaaatcataaatatctgtatgctattgaaatttaactttgtatgatgcttaaaaaccactatttggggaaataataaaataagtctttaccatgtatgaaagaaattttaaaaaatacaaaatattttctgattagcatctagcttataataaattttcaaaaaagctgaaggcaaaaatgccttcatcaggatgcactgagaactatatagttacgtcctgctttttgtataaactgagatgctcacatgcttccccttagaacaggcaatgtgctatgcataacatagttgtacattatctttgcggttgctttgagttttattttttattatttaaaattgtagttataaaatttttcagtatagtacagtacatatactgtgaggcgcgtgctaaagtgaataagcgagttttcatgctgacccactcaatgctattcagaaatcaattggcttagcactttctcatatccttaggtgcatttagattgccagagttaaccttctgcgtttaaaaaaagaaaaacactaaaaaataaaatacatgtatatacttaaaaaaaaataataaggtttccctcaagggaaaacagcagctacatgcttctttcctatactactgtagcaaaccaaggcattgatgagagggcatgcaaattgtgcttcactttacagtgttttatcagagcacttaataaaatgtaaggctggtatttatttgaagttgtacagtatgacttaattcacatctgttggaatagaaaatatattctgttgagtatttaagaggctgtacatgttttcttttgtgtttggattctttgtactttttcatgttcagtacatcaataaacaaagttgaagggaaa

SEQ ID NO: 324 - DNA, 16775 bp, Homo sapiens
ctttaaatcgcggcgcccagcggttctgcgtctcagttcccgagcctgggagcaaccgcagcttctagtatccagactccagcgccgccccgggcgcggaccccaaccccgacccagagcttctccagcggcggcgcagcgagcagggctccccgccttaacttcctccgcggggcccagccaccttcgggagtccgggttgcccacctgcaaactctccgccttctgcacctgccacccctgagccagcgcgggcgcccgagcgagtcatggccaacgcggggctgcagctgttgggcttcattctcgccttcctgggatggatcggcgccatcgtcagcactgccctgccccagtggaggatttactcctatgccggcgacaacatcgtgaccgcccaggccatgtacgaggggctgtggatgtcctgcgtgtcgcagagcaccgggcagatccagtgcaaagtctttgactccttgctgaatctgagcagtgagtgcacccccacctcacagcggccgtccagaggccccagtccccctgcagctcccttatgggctcattctgttgtgtgattccatggttatcagtcttcagttgatcaagtcttctgatcatgtgctctgtcataaggaaatgaagagaatcctggtttgaggaaagcgacgcccaggcataagctctagttttgcctctaactccctgggtgacacttctgccactctaggtgtggcttcatcctaaattcctatgctggtggttcgagttgagggagtgaaggccaaacttgaacttgagctcttagacctctcctaggcattccgagatttggggtaaattgaggattggtagagttcagacaagaaaatgggatgactgaaaaagtttgaagcctggtaacttctcaagtgtgcacgcttaaataaataatcctcaagtattagatataactttttaacctttaatatgattttttcatagtaaaagttacattcctactggaaatgtcctatctaagtgtcttctgcttatgcttgaggttgattcttttaatttataagatccagttagtgcagggaggccccttgcaagactctttggagaagctgcttgagattcccccgaagttttaattttcagacccaaggtcttctgtagaggctgacggtgtagtgctatcttggaaagagaaggttggtggcaggtggggaaaggctgacaagaaaggttctaaataacctgcgcaacataatacaaagaaaaaagtaaaggcactgaagggaaatgcagcaaaatagtcatagctgatgaaatcagaggtcagctgggagtggaaggcagtgagagagaaagaagaggtgggtcttccttaggtttccatcttccacaaagaaatttctgtgtaatggatgttcagtgaccccctgtaaaactggaaaggattgtatagagagacatatttctaaggatggtgggaagaaggataataggataattgttttactttgttttttaaattaaaggtttcgagttccttgtccgaaaagtcattaaattcccatttacttagataataatgattcacggctggagtatcttccttgagaaatcacattaattgtcttatatcatgtgtctgttatgccctttaactcacttgaagaaaagatcccttagtctttgcctagatgaacgtgactgcccactggcccccattgcatgctaagggtgaaaagtgttggcattgttcaagtttacttaacttgttttgtctacctcctatcaagggacaacttttaatagtgtatatcaaaagccatatagtttagagttattaaacctgttccaaatctgtttgaacaccttgaatacctgtggcatttgctcagtcaatgtgcatggttgttttgagtgttattatttcagcttttgaaggttctcatatcaggacttctttacaccaaaaccaatccataagtttagtaattatgtgttgctcattgccctcaggggttatatttgtacttataaaatgaaaaatttggtaataattattgaatttctccatggaaagataaatatatttaaggaaacggtgtcaggcattttaggtaccacgttaaggaattggcaggtggaggtttctaaggacaattccagagaggtctcactgtcagttttattcctctgatcaaaatagttccttttcaacatctttaaataggttttcttttaacttcctgaaatgaccaaatgaaatcagattgatctatgttgtaaatactcaaatggatcatccttacacatgataatgtgttaaaatgttttactttcattttttggttaatgtagttattacagtttttaaaactagggtgaaaggactaaatacctacccccccacacacactttagagatgtcttcctatttttttaaaactccagatcagaatccacttttattttacttaaagccatagtttatccaaggtgtggcttaggcctttctctcaaaacccattctcagaagagggacccttgactcacaggtgttctcctctcacctgccgtgactcacgggatgcttttggatagaacccaggaaaccttacttcatttctctgcctgagcagtggtgtttacgcccaccagctgtagagatctgggatggtgattcattggctggttttggtacagttttgttacatgtagagatgaaaagggttatgtgtgtatatttaagcagtatcactcagaaaaaagctgcatttcattaagtgtgtttaggtgaaaagcttagctgtgggtttcccgaaattgtaccttgccgtctttcccagtagagcacacttgtcttcccggccagatgcagggctttagcacgggaagtattaaaatctgttgtttccctgctttatgtagggtaggtcataaaaagcatatgaccttcataaagtatctgaaggaatacagtgtgctaatagtgtatacagtaaatacaaaatgagatagagcaaggcttcttcttttaggtagttcttgccaagcggtttatgaaaatgtaactgaggcacttcctggggaaacaaatgtcacattgtgtattgtagttttataatggctgatacaatttccatttcatccaaagtatgtgattttattgaccctggggattcttgtagctgaaagttggaatatacaaaaagtgccagatacagttgtagtagacttttcttgattcacctgtacctctcgccttgttttcatctaattctcaaacttttaggaagctcgcgccaattttatgtgcttgcttaaatgcttcttcttacttgactttaatagctagagctgtccaaagattgagttgctgtaggaggctgcatggtgggaggtgtgcaagcagagaataaataagcattttgaaggaatgttgtagggaagatccaagcaccagacaaatgggaggttaggctagactctctctcaatctcaccgaaccctgagattctgtaatttgtttataagctcctctagcctgtttaacttgctttgcatgaatccacatgtgtgtaggtgtgcttaatgagtattggtggctgtgagcttccccagcactctcaccatgatgtcaggctcaatcagagagacaaaatcactgacgtggacagtctttgaagcctaagtggagaggagggcacctatttatgcttctccagatgcgttgtgcctgctgaaccgagggtactcgaagggccattggtgttcagatatacttcataaattagttctgactcttagaataatggaagttgaagcaaaaatccaggcttgagatcagaaattctctgttcttactgtggtttggcactaagtagccaagtgtataatggtgagccacttgatctccctggtttcaagtagttaccccacttataaaatagggcagagtgggaggaatggggagatgaatctatgattcgtttatccattcaacagatgcaagctaggccctattcttgctgctaaggatggtgcagctaagatgagttctaagattccttccagtgccagaattctttgttattacttcagtgattgaaggggaagaggcaagtcacatagcttaggtttccttaattggagtgattaaggaaatataatggaggtaatatagaagcatcaacttaattctgagaaaatttcttgaagaaacacacaaacaagaaaggtagcaaaacttctgaggacatcctgaaaagtggtacatcctgcctcatccaggatcattttcactcctgattttgcttatgttctgagttcacatctggtgaccatcacctcatgcaccaataagagggaaatgctaatgattaggacttttatgaaactttgaacttccgtaaaagtaaaagatttaatatggagaaaagccaggggagtacacttctgtgactgtctgtgttgagctcatttaattgcaggggagaaggaagcacaatatttttgttctagtcacccaatcatcagttcatttattcacttaatacttattaagcaactacagatgcaaagggagaattggaatctgcagtcaacatttgaacaacacaggtttgaacagcaagtgtccacttataggtggatttctttcaaccaataccgatcaagaatacagtatctgagagtccaaagcctgcatgtagggagggttgactttctgtatacaaggcttccacaggatcaactgtaggacttgagcatgtgcagatttagttacctgtgggtggtcctggaaccaatcacccttatataccaagagatgactatattttgtttatgatatatagaacctaaggtaatatggctagaaaatagcataaacaatgtctggtattgatagtagattctactacttgtgtagcaagactttcaagctttagaaaaattacatatatgtctgtctttctacacatttgttgattaacctaagtgtagtagatcagtaacttccaactcacttcttgtcttataagtagagatctttgtaagtatttacttttaattctactttcaggtggaaaatgatgagaactccttagggggtctttaatctcaagattgtcagtctagctaaatataattaaaagactgccttctgtgtttactgctgaataatgatgagaaaaaatagtgtaatttttttaatgtttgctaaccaggttctccatagacaactttagtcagtggtcataatattgtagatttagctgcaaatttaagaggtgagaaaaggaatatgtttgttcctaggtttgttctaatcagaccaattcaaagttaatattgcaaggctatacaacatctatctcatccaaattgttgttttatagctttcaaacatcctttttaacttctctgctctgccactcatcattccattagggcaaaaagaaacaaaacttaagctttgaagctcattagatacatactttaaaaaatagatcaaaataagcaaaaagtacaatttgtattatctgcatgagtttctagttatcagtgacctaagctaagtctggcttttagtagcaagattttagcataccaggctctcaagggaggtatttctcagtattatttcaaaaattaagctaaacacaagagaataagtatttttacctatcatattggtacagatttttaaaggataaagacatgttctaatttaaatttattgaaatttgataaatccatgtgacttttcaagtactgtgcttggtgctttagatggaaataggaataaatatctgactcaaatcatccaggagttcatgattacatactttacaaatctgatttaaaacacttctatgatgtgaaggtattcatctgtttccggcttaaaactgtgcaatttagatttgatctgcacataaaacacttgtaacttgtaacacaatagttgcttactttgactggtaacctatcattacctacgccttgcttgtgagttttcgtgctgttttaattctcagctttttgtgcgtgactacatgtgtatattatttttgcattttcctcacatataactatacttaagaatttatccaaatatctccaatgaagcaaagcaagattttgggtttgatgcaaatctaatattggaacatacaaataaattgtataagtcaatagttgccaggatgtaagtgaaaatattactttgcaaaacgacattttaaaaaacaaagcaggatctcatttctatggtttatgcaatttttaaatattgtgttttccattttctccattactttttgtgtattatgcaaataatatattattctatagagaaatgaaacctgataggtttcttagcaatcatagaacagaatatcagtccccagccccttggaaagaacactttgtagatgaagtggcaagatagatttgacacgaatcaaatgtgttttctttgagaacttaatgggcaaaaacttagagattaaaaatgtgaatattaggtcattccaggtgggtgcagtaagggccctggagtagtttatgcacatgtgttccttgcctgggagatcaggggttttacacagtccgactcatgagattgatgcccagttagacttctcttgaagactactctgcgatctaagtgctcagacctgctgggcaagtgaccttctgtttttacttgaagaaaagatcagtgtgattattctataaactggtccagtttggggccccacaacttgaacaaagagaaaaacttggagcaagatcagagaaaacatctaaaatgattaataaaaggttgaaaaagagtatttatgaaaaaataaaatggaggaggctgtgaaatgtaagatgctatagatgcttgaagtgctgtcatagaaatatttattgattgtgtgatctctatgctgacagtaaaaatcatgtcgcccctttctcaagataatcatatgacttctgattatacttagaatagaatccatcttcttaccctaatttgcgaagttctgcatgacatatgccttctgcccaccttgctaaacttcgttttactttgcacatcctatcatcctgcgttaggatgaccagctctcccaatttgttcaggattgagagccttctaaggatgtaggactttaaactttaaagctaggactgttccaggcaaactgagatatgtggtttccctatcctccagacatggatcatctttgttactttcagcatctcctcttcaggcatatctctgcctgaaatattttcctgccaagtgtaatcttaggaccacatctgaaatctgtgttatgtatgggtttagttattttatttgttatttcccaataatgatagcctttgcaaaaaccatccatcagaaagaggacataccttaaccatggagcccttggtactttcctcttcataccacagtatggcttgtgattccaaggaaaaagttgtgtaataaccttacaagcagcttcagttccttcctggtaaacctgtggtccgtggaacatgtgttttgatccagcagttcctctgccacctggaatcttgagataagtgtgtgggtcagtgtgcatgtgtgcccatacatgcttatgaggaggtcagtgtgtgaggggaatcaggaagtctcttttttatttttaaatgaaatcaagtaaaacttaaccttggcttcaaaaatatctctcaaatactgtaaacaatacctttgatactttttagaaagagattatggccaggcgtagtggctcacgtctgtaatcccagaactttgggaggccgaggtgggcagaccacctgaactcaggaatttgagaccatcctgggcaacatggtgaaacccatctctactaaataccaaaaaaaaaaaaaaatttagccaggcatggtggttcgtgcctgcagtcccagctactcaggaggctgtgggatgagaatcgcttgagccccagaggcagaggttgcagtgagcccatatcgcaccactgcactccagcctgggcaacagagcaagactctatctcaaaaaaagaaaaataaagagattactataattttatcatagattgcctggttatagcaaagacagaaaatcagtaaatcaagatttaatgaagttttagaaatatttagcttcaattatgattggtgacctaagttctcaatcttgacaatattaacactaagcctaggcctgattagatattgagatacaaaacctttccaacatctcagccacttttaaagaccatcaaggagtcaattgttccaatccactggataaagatataatttacattttacttatataattgaaatattattccaaacaatactaagtttcttgctcaagatagcacagtttgttaaagctaaaaaatacttatatatgcaaaaaacacttgtcacatattatcactgtcaatgatatagtgatctttaattaaaggaggacataaatctagaatttaaacaaaatcttctaaccagcatagtttcagttcatatttaaaaatctgtgcctttatgccacaatgatggcatcaagtttttactctttaagaaacatagtgataatgtctcaaacttgaccctgtttatttgatcatgagttagtacaccaaaaataatgatgggaaattagaaaaaatggaatcctgagaaacactacattgaattattgtgtgtgctattttacaacatggcagcttaaatagttttaaaaaactagtgatgtctttgaatatgaatctactactatgtcccaaggtaacatctcaaaggttattttgtttagttttaagaaaatgacttctatattcttccccactcctcctattcacatcactggagatacaaatactgcttatccagccatgataatctataaaacatttattttttatcttccaattcatccagtttttctgaagcttattgattggggtgtaaagctggtgactaatatcaaagatatactgtaaaccattttgattacaaatagttaacatccaggatagtatatatgattgttacttaaaattaaaattatcttagcaaggatgaaaatcccttagtaaaaaataaatatgtattagttcagctaaccctattcaattagatcattaattaattttccagttgattttgaatttaatgttggaaacataaaatattggagtggagggatctctttttcatcatccagcctggcatttgtttttctggagaagatactgtatattgggttaccagcggaaacatcagtatgactggggtctctagattcctagtccagttttctctcttccatacaacagtgacatatacttggtcttcttccatttttctcttgttggtccaagcatatttttacatgttttaaaatgttttctgccaggcacattgcaagcaacccgtgccttgatggtggttggcatcctcctgggagtgatagcaatctttgtggccaccgttggcatgaagtgtatgaagtgcttggaagacgatgaggtgcagaagatgaggatggctgtcattgggggtgcgatatttcttcttgcaggtaatagaggctgtgcccccctttcaccttactaacctgttcctggtatgatttgaaatctattacgttggattcattatacttgatttcagtctctaaggcaaactgcaaacatagacctgaagtccagttgactttcatgttctcaaacacaaactaaatgaaaatgtgagagctctgctcacatctgacaggtctattggttgaagtttcaagtggcaactggtttgttagaaccagtctcttccagtgaagaaagttgttcactatttagcaaacgctaaggaggaagttcatgtaattcagataattcctatggtgtctccacagatactatgtggaaaagatggggagtagtgagagaaaacacaagaatatgtgaacccttcaggtctgtgagggatggaaggattgggattattggagaaaaataaggatagcattccagctgggcagatctaattcgagaataaacaggatgtgcctgtagatcaatgaaaagaaaggccaactggagtagaggtggcctgttggaatggtcagtttaaagcagttaggaaaaaaaaaatacagaaatacctttaaatttttttgataaaataatattatattttccatttaaaataaatacgtgttttttaggccaggtgtggtggttcacgcctgtaatcccagcacttttggaggctgaggagggcggatcacctgaggtcgtgagttcaagaccagcctggccaacatggtgaaaccccatctctactgaaaacacaaaaattagctgggtgtggtggtgcacgcctgtaatcccatatactccagaggctgaggcatgagaatcacctcaactcgggagccgagatcgcaccactgcactccagcctaagcaacagaagactgtctaaaaaaaaaagaaaaaagaaaagaaaagaaatatctgttttttaattcaagtgttgattgataagttacattatgtgtcatttgagaaaatcaaagtcagaaaacatggacagcattatttcaaagctttataataatgcctatttaaaaaattatagtgtatgtatacttacgtgtgtatatgtacatacatatgcaatctctctgtgtgtatatatatatctttatatctatacactgtgttatatatgttgataatctccatataaattatacagctataataatagactactatatgttctctatattaggtattagatgcatatattatatatgtagtatattatagtatattattttaaaaaaataacagatataattaatgatacaaatctactaatagaaaaaaactagaatagactttattttcttattttctttttgacagaagacttgtaggggcttttgcttcagtataatatgtcagtttaaccagtaattgaggaagagtatctgtggctttgctaaagatgtggttagtttaaaatgaccagtctctcagtttacccaaatacaaattgactcctctctgaaaaggcatggatagtgtcttattcccaataatttactcttatatcaaaggctgcgaatagtaatctttgtggccatcgtggcatgaagtgtatgaagtgcttggaagacgatgaggatgaaatgcattgcattcttccttcgcttgccttcttgtaactcccacatgtgactgcatcactcctattccagtttcagggacttctcttaggagtaagcatcacaagttcaagaccattcgcatggtctatttgagaagccaaaagcaatagtgttttctgtcatgtctagaggcaattacattggaccatgtttttggctggggagagacagtagcatagaaacatctaatctatctatattgatgaatacttagaattactacaaaaaagttatttaacttttttgataaaaaaatgaagtattttatacatcttataaatgattaagtgaatgattttgactaaatgatttctctgctatcattgaatataaaatgccatgggaaattgagattgggttgcataaattgatctgatgtggcaccctcaacaaatctcaggccaacctatacctatatcaggtattcccttggccaatggggcagtagtaatgcaggtattctggtccattctgagacatgtcctgatctcactctatctagctgcttgcattccttttgactctgcagaaatgtaaattttgagtttgatcaagaacatagaagagttttcatcttccccttttgcaagtaattctacctgtactaataatgacaatagttttatcaaatgtagtttagtatcctaatgtataacagcatatttaaaagagattttgtacaacatacacctgcctaattgtttccaaaaaagaattatttgtgccaagatatcataaaaaagtataaattttgtctaatgccaacctagtatttttttatattttaatagatacttggaataaatcatatctggacttctaatctccctaataccaaaataaaaatgtcaacactattgatgagatttaattcttgcaaaatatgttttggtttaacaggttgtgtatttaggctcagtgttccatggtgattaacagtcttttgttttgaatttctataggtctggctattttagttgccacagcatggtatggcaatagaatcgttcaagaattctatgaccctatgaccccagtcaatgccaggtaacgctattcaggcgtaaaatagtttgttttctgagaaaatgccctttttatattctacaaagtcctgctagtgccatcatttcccagatttgctttcaagaattttatgtcaaacctacaaacaatttaaatgatctctgacttatgtcaaaatgagtttgataattgctttaacaccctgtattgatgacaaaataccttccaaagtagaaaagtttcaagctctgtgcttttcaactgtataactgggctttcttttgtttgttttttcaaatattaataaagatgttaatatatttgaaatttcctttttgaagtgtattctgatgtttacaacacctacctaagattatttgtaactaatgcacagtttatgattgattgagaaaaattatactactataggggttaatgaataatacttcattcccaacagttcatttttacacgtaaagctattatgtatgtttttagtatgttcagataccaccttgaaattttttgttctttcacaactgtaaaattggctttacaaaggtcatctttcttaatactgcaggttgtgcaagttgagctgattcttagctctcgtgtaacaacattctttaatcagagacgaggctcttcatctcactgtcttcacatctttaatgcctaataactacattcagtcaggatgttaaaatataattattgtttgttgagtgcttagatgaatggatgaaaaacctcagtgtttggagagataagatgtgtttctttttatataatcacccacatatgggagaacacatactgcaatggttgtgttggagcccatcccataagatttacagtgtaagaatagaaactgctagaggtcagtaggctaaaatttcgccaaggtaataacaccagtaatgcacaggaaagcactttataaattgccagccattttgcaattgttatttacattattgcatgtgatcctaaaagcagtctattgaggcaggtgggattatcctgctttgagagtaggagaaactgaggctgagaggtgaagttgctatcccagaattgcagcagttgagagtctgcatcaggatttagacttggccttataacttatagaaccaacccttctctactcttccgtattgtccataatcactcacagataccccaccctaagtgtctgctttaatacatctgcctggatcagcttaatccagaatggttcatgggctgcttagaacttttctttacaaaaccataagatttggatttcagattgtataggtgcctgggaccaatggatcatctgttcaaagctctgattatctccattatgctctatcagtttctttatagaatatgattactacttagtgataaagcttcctttgctaagtttcagcctaggaaccatgatccaaaccctacttctaaaacatataaacatgctttacaagtatcctatatatggaaaagtccttggaattatttgtgtaattaacctggtattacatgtgttatttcctgatctactattgcaaattgtcaccaattgcaatataaacattctttggcgtgtatgttcagaaatcttaaagtacttcccaagggatattcaggggttattttcaatgaaaaaaatacaatgagtattgattttttttccttttattatattagaaaagttgccaataattcactgattaacaagcacatgggtttttccttttaggtacgaatttggtcaggctctcttcactggctgggctgctgcttctctctgccttctgggaggtgccctactttgctgttcctgtccccgaaaaacaacctcttacccaacaccaaggccctatccaaaacctgcaccttccagcgggaaagactacgtgtgacacagaggcaaaaggagaaaatcatgttgaaacaaaccgaaaatggacattgagatactatcattaacattaggaccttagaattttgggtattgtaatctgaagtatggtattacaaaacaaacaaacaaacaaaaaacccatgtgttaaaatactcagtgctaaacatggcttaatcttattttatcttctttcctcaatataggagggaagatttttccatttgtattactgcttcccattgagtaatcatactcaactgggggaaggggtgctccttaaatatatatagatatgtatatatacatgtttttctattaaaaatagacagtaaaatactattctcattatgttgatactagcatacttaaaatatctctaaaataggtaaatgtatttaattccatattgatgaagatgtttattggtatattttctttttcgtctatatatacatatgtaacagtcaaatatcatttactcttcttcattagctttgggtgcctttgccacaagacctagcctaatttaccaaggatgaattctttcaattcttcatgcgtgcccttttcatatacttattttattttttaccataatcttatagcacttgcatcgttattaagcccttatttgttttgtgtttcattggtctctatctcctgaatctaacacatttcatagcctacattttagtttctaaagccaagaagaatttattacaaatcagaactttggaggcaaatctttctgcatgaccaaagtgataaattcctgttgaccttcccacacaatccctgtactctgacccatagcactcttgtttgctttgaaaatatttgtccaattgagtagctgcatgctgttcccccaggtgttgtaacacaactttattgattgaatttttaagctacttattcatagttttatatccccctaaactacctttttgttccccattccttaattgtattgttttcccaagtgtaattatcatgcgttttatatcttcctaataaggtgtggtctgtttgtctgaacaaagtgctagactttctggagtgataatctggtgacaaatattctctctgtagctgtaagcaagtcacttaatctttctacctcttttttctatctgccaaattgagataatgatacttaaccagttagaagaggtagtgtgaatattaattagtttatattactctcattctttgaacatgaactatgcctatgtagtgtctttatttgctcagctggctgagacactgaagaagtcactgaacaaaacctacacacgtaccttcatgtgattcactgccttcctctctctaccagtctatttccactgaacaaaacctacacacataccttcatgtggttcagtgccttcctctctctaccagtctatttccactgaacaaaacctacgcacataccttcatgtggctcagtgccttcctctctctaccagtctatttccattctttcagctgtgtctgacatgtttgtgctctgttccattttaacaactgctcttacttttccagtctgtacagaatgctatttcacttgagcaagatgatgtaatggaaagggtgttggcattggtgtctggagacctggatttgagtcttggtgctatcaatcaccgtctgtgtttgagcaaggcatttggctgctgtaagcttattgcttcatctgtaagcggtggtttgtaattcctgatcttcccacctcacagtgatgttgtggggatccagtgagatagaatacatgtaagtgtggttttgtaatttaaaaagtgctatactaagggaaagaattgaggaattaactgcatacgttttggtgttgcttttcaaatgtttgaaaacaaaaaaaatgttaagaaatgggtttcttgccttaaccagtctctcaagtgatgagacagtgaagtaaaattgagtgcactaaacaaataagattctgaggaagtcttatcttctgcagtgagtatggcccgatgctttctgtggctaaacagatgtaatgggaagaaataaaagcctacgtgttggtaaatccaacagcaagggagatttttgaatcataataactcataaggtgctatctgttcagtgatgccctcagagctcttgctgttagctggcagctgacgctgctaggatagttagtttggaaatggtacttcataataaactacacaaggaaagtcagccactgtgtcttatgaggaattggacctaataaattttagtgtgccttccaaacctgagaatatatgcttttggaagttaaaatttaaatggcttttgccacatacatagatcttcatgatgtgtgagtgtaattccatgtggatatcagttaccaaacattacaaaaaaattttatggcccaaaatgaccaacgaaattgttacaatagaatttatccaattttgatctttttatattcttctaccacacctggaaacagaccaatagacattttggggttttataataggaatttgtataaagcattactctttttcaataaattgttttttaatttaaaaaaaggatta

SEQ ID NO: 325 - DNA, 35981 bp, Homo sapiens
agaacccggaagtgcgaggccgaggagagccacgtgggtcgagctggggcgcagctcgcatgggggagtctatcccgctggccgccccggtcccggtggaacaggcggtgctggagacgttcttctctcacctgggtatcttctcttacgacaaggctaaggacaatgtggagaaggaacgagaggccaacaagagcgcggggggcagctggctgtcgctgctggcggccttggcgcacctggccgcggccgagaaggtctatcacagcctcacctacctggggcagaaactaggtacctccgccccgccccccgagccccttgaggaggaagtaaagggggtatattccccagtcggcagtggcttgggtttcccgtctctgtgtcacttctagtcgcaggctcgactcggcattcccagatctcctcccaccgttcctttccttccctgggcttccacaagccccgcccaccggcctgcgctgctgatagattggcgaactgggtagatgctctttgcagggctgtgacccaaaccgaagggtttgcccttttgcctcgtgcatggattgatgccataaatgagaagttaaccaaactatgtcttcattgttttaattagtgacgctgcagccagaagagcaaaactttgcaaaacaacctagttctattactgaacactgttgtgtggcctcttaaggttaaggcccgagagtcacatttagagtcctaccccgtcttcatagtcccccaatacatatttaatgactaaagtaataaatgaatattgggcaggaaaggcaagaaatatgcctaacactagcaagaagagacttaaggggaaaatggtaaacactcttagcacttcatgtacatcttgcctctgaaataagattcaagagctgattcaactgatttttactagtagaagcaataagtataagtagatgagaaggaaataatagatgtaaaaggcatggaatatgcatacaaaataatattactgcttaattatgacaaataaatatatttgaatcctaggggtttcagagtcagtactttgacctgttttagactcttcaattttcagaagcgtgaggtctgatgtgaatgaaggacacgtatataaaatacagagaatagaaatgtaaaattggtgtagatttcattttgatccacccccccccgttccctaaccagccccctactttccttatattgcctgaaggtgaccatgtacatcttattgagctttcagtaaacactcaagagacagggcttcctgagttcgtaattgctgtagcaagtatgttgatttatacatacttatttagtatgctaatttattagcaaaaactggtcagatagtttcaccttatttttttcctcccctttttacaatggcatttctcacaaatttgcagttgctgctatggtgttattattcccctttctatagattagcaaattatatatgcagttatgttgggtagatgatagagtcgaaaccaaaatatctgcccttgtactctcagattgagtttgcattcatataacttattaaaaatgtgtatgaaaattataatttatgtataatatatacagatatatgttttttatatatgtgaaaatggggtggattctagctgtaatactgaaggtaggtaatatttaggcagtttcagttgtttttagactcccccacctcaaagaatggtgactgattcaagtgccatgattctttgctttttttttttattaacttatccatggaaatttgatgaaagctgtgtacttactctccagaaaaatatatatgtacatataattttgcgtataacctgagtgggttcagttgaattttctaaagtctatttattgactccatttaaaaaaatctgctactctagttttaagttgaatgagccaggtttttacgtaaacagaactggctgccctgtgtgtaagaatgtgtgtataagatcttcactgtctctgacttgggttctgtaaagtggtcctcaatgtgtaaattgattagttctgcttgaaccccagctggcatgggtgagcatgaggactatgccttgaaactgacctatacaacatttggtgctgtgaaacatgcccaggcactgttacgttcctaggtgggctcctcatttctgagtaaatattctgaaaatggtatatttaatgcttcataacttatttacacgtacagtaaacataagttccagaatttaaattttatctttgcacatttttttgggtactggagtgtatatgatatcagtgtgcttacaatacgactacacaattacccggtttactattttcttaaaaacttcaggagaaaactttcgtgttgccatttaaaacattcccatgttctccaactactttgctcattagaacatttatatagttttctttagaaagcaaaacaaaaagtttatgcgtgcgtttaaaaaatttaaaacaattctgaaaagtttttttagccttactgagatataattgacaaataaaactatatatatttaagatgtacaacttgatgttttgatgtatatgtaaattgtgaaataatcaccacaatcaagctacttagtatatccatcaccttacatagttatcttccttccttccttctttctttcatgtgtatattgtgagaatacttaagatctactctcttagcaaatttcaagtaaaaagggagtctttttttacctctcttatggatggtatttatttgaggccttagcagtgaatcctgattaaagaagcaagcagggcctttagacaaaggatagaccttgacagggagctttcttttcctgtcttgaccctgttactgaaaaacttcgagtagggcccttatcttggttccttctctttcctttaagagagaataatacctgtttggggaaggatcagtgattaaaatatgctgactcaatgcctgtggagaattttagaaggtcatacttttcttccctttgtttcattactggagagtttcctcaaccttgggttgctgaaatttagcatagtagaaaatgacttaacttgagaactgatgtttaaaaagtattattagcaagaagttggagaataaaatgcccaagatgttttacacgttccttcaatacacttaaaatttcatgacatgagatgaacttgaaatcttgagaaattatgagcatttataactagagccttctaaaaatcattcaaagtaatcatattttttaaattaaaaatattgaaaagagaaagaagttggatgtttctgattccttgttttccagcatgaagaaaggtcagtccccgctggatattccaaaccaagatagtgaacagataggattgggttcctgagagctttgagaaaagagaactgtttgaaagaaatgtgttgatggtctatctcttccttagagtagtttcactttacttggtttcacatgctggtgattagcgtttaccgataagcttttaaaggtattctttgtatttatgtagtgtttccgttcccccagataggggtaatctgatgaagttaggtatccttttttttttttctcccataagtcctagagacagatgatatccctttttcaatgtgaagttaaaattttcaccaaggccaccccgtttaatagtactagatagctattctttttgtagtatttgaagctcccaattcaccacagtttcagaagctcaattatgtattattattaggagttttaaaaaatgtatcagttataaatagaagggaaaggaattagtattatagaatatattctttgttccaggcacattacacaccaaatgttatttcatttgttttttttagctctatcaccagttttatgttaaaaatgacagctaaagctcaaagtggttcagtagtttgcacatcaacatagcctgtaattgtgggagctggggtttgaaaccaagtctttcagacctccacagcttttaggttttatatgatactcttattaccctcctaagccgagaggttttatcctagatgtgggcacagaggtctatttatgttgtacccttcactgtacaaaatcagcagagctaaactgaatatgggcatgggaggaaggcaaaccctgtagggaacagttccgtatgagatattggtgtcacatctggtccacctgtacccatatggactttaattgtattagttggagaaatgatgtgccagctactcaatctgtttggaacaagcttgtccaacctgtggcctgcgggccacatgcagtccaggatggctttgaatgcggcccaacacaaattcataaactaactttctttctttctctttctttcttccttccttccttcctttcttcttttcttttctttcctttggtttcctttcctttcttttcttttctttcctttccttttcttccttccttccttctttcttttcttttcttttcttcttttcttttcttttgatggagtcttgctctgttgcccaggctggagtgcagtggcacgatttcggctcgctgcagcctctgcctccctggttcaagcgattctcctacctcagcctcccgagtagctgggattataggcacccaccaccatgcctggctaattgttttgtatttttagtacagacggggtttcaccatgttggccaggctggtgttgaactcctgacctcgggtgatcctcccgcctcagcctcccaaagtgctggtattacaggcatgagccaccatgtctggctaaactttcttaaacaatatgagattttttgtgcgtttttttttttttcctcatcagctatggttagtgttagcatattttatatgtgccccaagacaattcttcttcttctaatgtggcccagggaagccaaaagattgaacacccctggtttagacagtatattggaaaaacacttttcaaagtatcagtagtttgtctggggtgtcagaaataagtagggtaaccaactgttcaaaattttcccaggcctgagggatttctaggatgtgggactttgttttaaaaccttataaagatttcctgagaagctagacttctagtgctaaaacctggaaagtcctgggtaaactgggacaagttggttacctagtagtaagggaaggaagattcatttcttgaaacataaaccgagcaatgaattaaaatcaatattgtaaaatggttcatttattaagaggatattttacaaatgccttgatacatttttattcctaattacaggtatatgtttagaatagtaaattcattgaagagaaaatttaaactcttgtccatctcttgagtttttttatatattcctagaaatcactgttttaaacctgccctgtttctttttttcttttcattttcctaatatcttgcctctggccctttggtgggtgcagaattgcttaagggaacatccatgaagctggctccataattagaaatataattgctcatgtgtacatacagaagtgagtaaatgatatctatgctatttgatcctttttggctatataaaggtgtttttggttttattttttgctgatttcctttggaatcccttggttacagcagcagttatttataattggttcctggtcttaataattcacaatgtggtgcttattatttataacatatagtgtcaaccttgtcaagagtgctaagattttctttattctcctgggatcccagtagtctgttttcttgcatagagggaatatatgtgtatgtattcaattttctggtatgatctaaaagattagattcaaaggaaaatacaactctaaagcagaaacaaaaaatcatgacacagcaggaataaaaatagtgtttcataatttgtgtgctcttttgctttgaatacatctatgtgaaaggtaggctttttagttccagttggtgttatttgctaggttaattatgctctgaagtaaatctgaatcctcattgaattggggtgggtgagaattggtacatgggtaagcaaattgtacacaggtccattgctacagtaatgaattctatcaggtattcatttagcttattccttagggaaattatgaatcaaagtatttatgattatcataaagtatttatgataatcataaagtatttatgattatcataaagtatttatatctcaatcatagacagagaatatggtagatgaaaacttactgagctcaatgggtttggattctttgcttttgcatgttggtaggtgtttggtacttacggtttctccttcttacttgtcatgtgcttatgttgtttgcctaccagggggccagtctttcttcagcaggaaggattccatccgcaccatctatacttcattgcataatgagctgaagaaggtggtgactggccgtggtgccctgggtgggactgctcctcacgtggaagaactcctttcccacctgtcagagcagctctgcttctttgttcaggctcggatggagatggcagacttctatgagaagatgtacaccctcagcacacagaagttcatcaatgctgaagagctcgttggccttttggatgccatcatgaaaaaatacagctccaggtcagtgtggggaggagggagggagaaagcgtggctgtcctatcaatcccacacaagctcagagtttttctccacactcttatgaaaatctgtgatgaaataactgtgaaataaataactggattacattttatacatattcattaatcaacaggtatacattaggcaccttcattggtcttattaacaccacacggctgctaagcaatagcaaaagaccgagaatgaagtaatcgtaaaacttgtattataaccgattttgctgcttaggaaagagttcacacaacaagagaattgtatataaaataataggaatttcttttttctggaaaccaaattgtaacatagtaaaataatatgaaaatacgtattattgtattttctgttgcccaggctggagtgcagtagcatgatctcagctcactgcaacctccacctcctgggttcaagcaattctcctgcctcagcctcctgagtagctgggattataggtacacgccacacccagctaatttttgtattttttttttttttagtagagacggggtctcaccatattggccgggctggtcttgaactcctgacctcaagtgatccacccgtcttcacctcccaaagtgctgggattacaggcctgagccaatgcacctggctgaaaataatgtgaatttttaacaaattattattcaaataaatattgtcccttttaaagtaatcagtgatttatctgcttgttcctttgaacaagccattctttaacatgtgttggaaactcctttgtaattgcttttagagtttctgccatacagtttagatttcattttaagtattcttagtggaggagggcatccactaagtgcctgtaatctcctgggttcaagtgattttcctgcctcagcctcctgcgtagctgagattacaggcacatgccactatgcctggctaattttttttgtatttttagtagagatggggtttcatcatgttggtcaggctggtctcgaactcctgaccttgtgatctccctgtcttggcctcccaaagtgctgggattacaggtatgagccaccatgcccagccgagttgagcttttaacggcaggtaggatttcgaaagcaactgtaggaaagaagacggcaggtgttttgagatgagaggatatttcagaatacaaaaaggcttcagggttttggtacttgcaattctttctctcttataagttcttactgtagttatcttctcatctttaagtcttggttcaaacagagaaggcttctctcactatcctaccaaaactattctgcttttagtcactatcttattctcctgatttattgccatctgaagttactgttgtttgtttagggtgttttttctttccttttctcaaaaactagaatgtgagctccatcacagctgctgtgcttttagcacctggaacagaacctagcacatagtagatgctgaatagatgtttgctgaataaatgagtgaatagttgtgttccaggttgaaaatttgtacttaatttggtaagcagtggggaaccatgaaaagttttgaaccaggagtatcatgttctcatcttagactaattactgtggcactgtgtgtgcaatgggatggtgaagggagaggttacaggagaaaaggttagtttagcaggctatgatggtagcctaataggcagaaggagggcctcatggttgcaagacagtgggataggagatgctgacaagaagtctataagtcttgtcaacaggatggcaggaataatgagaggttgctgtcaaagatgatacttaggttttgcccctctaatgataatattgtttacagaattgaaaagacaagagggactgaagaggaactggtttagaaggaaggtagtaagctaaaattggggcaagttgagtgtgagttgctagcagattttcgagtaaagatttagcaggcatttggaaatgggggtctagagttcagacgaaaggccagaaataaaacaacttggaagtagactcatacagttttatggtttaaaaactaaaatgtcattgttctttaataaaacagcaattgatttttcaccttgtaggaaaagggggggaggtggaaatatttatatatacctattctgaaggaaattagcatgtattgagcaactactgtgtgccagacactatgcaagaccctcttcttggttacctggtttgaagtacaggtataaatagtgcaccttttatagagtcccagagaagtggaacactttgcttagagtcatacagcttagctctgtgacttcagagcccatattcttttgtgtatgcatcattgcttgttattaaaaattgagatgttttttatctagtccagataaataatttctctttgctgatcattttgtaagtcaataaattagttcttcagaagacctaggaagcatttactacatcctcttgctaggaatacgagttgtgtgctacctacaaccacatacatacatagtctttctgagcataagatggttgggtaaaaattattatgttactattctttctttctttttcttttcttttttttttttttttttgagtttgtctcgctctgttgcccaggcgggagtgcagtgacatgatctcagcaaactgcaacctctacctccagggctcagcgaccttcccaccccagcccaccaagcagctgtgaccacaggtgtgcaccactatgcctggctaattttttgcatttttggtagagacagggtttctccatgttgcccaggctggtctcaaactcctgagctgaagcaatccacccacctcagcctcccaaagtgctgggattacaggagtgagctactgtgtccagcctattctttctttttcctctaattttttattttgaaatttttaatgctataaaaaattgcaaatatagtataatgaacatagttaccatatgatcagcaattctactcctaggtatatatccaagaaaaatgaaaacatatgtccacacgtaaaaccattgacatgaatgttcatagcagcattacttatgatagccaaagggcagaagcaacccaaatgtccattgaccaatggatgaatggataaataaatgtggtatatccatatgatggaatattattcagcaataaaaaggaatgaagtgctggcacatgcaacaacatggatgaaccttgagaacattatgctaagtgaaagaagctagtcataaaagaccacatggaaattacataatttccattatgcgaaatacccagaacaggcaaagtcatagacacagcaagtagattacaaattcatagtcacagaaaatggttgccaggagttggaggggaaggaggagtgattgctaatgggcacaggattgcttttttggggaccgtgagacttttctaaaattgatcgtggtgatggttgcgcaattctgcaaatatattaaaaccattgaattgtacactttaaaaggttggtacatgaaataattaacagtaaagctgttactaaaaaaaaatgactgtacaatgaacatataactgtccttcacctttattcacaaattgttaacattttgccacatttgccttatctctctctgtatatgattgtacttccctgagttatttggaagtaaaatgcaatcatcatgacactttcctcctacatactcagattttgtcttctaagaaccatacataatcataacacagttttgaatgaaaaaaacagtttttacattcaggaaatctaacactgattttctgccgttgtataatacatagtccatgttcagatttccccagttgtctccaaaatgttctttatagttgcttgttattttttattgtcatagctctttgatttttgtgacatattctaaattttcttttttttaaattgtttgatatataatatgttcacatgggtcaacatttataaagtgtaacacagtggaaagtcttcttccttcctcttagccacttagttcccgtctttaagaggcaactaaagttagcaggttttttttttctttaagacggagtcttgccgtgttgcccaggctggagtgcagtggcgtgatcttggctcaccgcaacttccgcctctggggttcaagtgattctcctgcctcagcctcccaattagctgaaattacaggcatgcgccaccacgcctggctaattttttttgtatctttagtagaaatggggtttcaccatgttggtcaggctggtcttgaactcctgacctcaaatgatccccccacctcagccttccaaagtgctaggattggtgtgagccactgcgcccggcctaaagttagcaagttcttgctgtcattcctgagaaataggctatgcatataaatatatgcttacttttttaaacatttaaaaattttatatttttggaagtattcttttatttcttcctccaatctgattaatatgttttcttttaataacatagttttttgaaaccccaaaactgaagtacagttaaggatatgattcctaaggggaagagatctcatgtagtaattcccaaacactaatgtaaaagtggtttgctgaactcttcgggaagcttaagaaaaatacccatccctgagcccttcctcctcttccctaagagggtaaaatttagtgtgcccagaaacctctgttttcaaaattccctgtgataatgatacgtggtctgcactcaaaaaaattgggtaactaagagaaagatgtcagctccaggatagaataggtactgaaccttactgatgtgtgtgtgcatacacgtgtgtgtgtgtgtgtctcctgggactgattagtattaattgttttcattttattagatttgtgccctatcatctttatttatttcgagatgaggtcttgttctgtcacccaggctagagttcagtggcgctctctcggctcactgcagcttcaactgcctgggctgaagtgatccttccacctcagtctgccaagtggctaggactacgggagcatgccaccatccctggataattattttatttttttgcagagacagggtctcactatattgcccaggcttgtcttgaactcctgcgtccaagccatcctcctgccttggccttccaaagtgctgggattacaggtgcccaaagtgctgggattacaggtgtaagccacacacccaggccctatcatctttaaaccttctttgaaacaccccacttcccagagccttaggagtttctccctttccctgcggatttaattttcaaagttcttagggcagttcttagttgaaaccctcatcctctgagtggatattgatggagttggatggaactggattacagtatggacaagagatgtcttttttcatctacaatttccatcttccacccatgctgcctttctctaattaatagggaatgactgatcacagacacatcctagcctgaaaatgatctaaattagaggctttgggttaatttcaacaacataaattctttaaggaattctgaaaagttgaacttctgtataatgattttctttgggcagtgggattcctttatgtatcaactaacatgattttgccctttgctaggttaatgtgcttttttctgtagactttttgatctggcatctgtgctacaccaaacatttctcctttatggtttcagtgttctagagaaataattcatattttggtattctgttgtattgaaaaagttaatcctcctcccaaaggatccatttatctttcagggaatgtcccagtgtagctgatccatgtcagaactcttataacaaattttgtgactagtactatgtttcaaatgctgaaatacctttgtattaaaaaattaatgagtgtgatgaatagcatggaatctaaacctctggccttgatttcacatgtaagtcctgtgtgagttattgcagtgtctagtctgctttcacagatgaatggaaagtatattttggttttcttcttctggaagccagttgtgttcacagtagaatggtgttaaaaaaggcttcctttttggtaaatttataactttttttatttttgagatggagtttttgcttttgttgctcaggctggagtgcagtggcgcaatctcggctcactgcaacctccgcctcctgggttcaagcgattctcctgactcagcctccaaagtagctggaattacaggcgcctgccaccatgcccagctaatttttgtagttttagtagagatcaggttttaccatgttggccaggctggtcttgaacccctgacctcaggtgatcaaccccgcttagcatcccaaagtgctgggattataggtgtgagccactgtgcctggccagtttataacattattaagcatatataagttcttgtttaggaatcacagtcatttgtgattctgcattttaaattgaattattaacaaattgaactatattaataatataattattatataagtttaattgtgtgccatttagcggaagaaacatgaacttagcttgtatagggtcacagtatctgctattccttgagtacttttgaggagcaatagaacttgggtttttgtttttgttttccaaagaagcaccagtggaacattttctgattctgcagaattttttacacacttatttattgtttgtgggtataaaagaaaattctggctgatttttctgtttcatggttaaaacaaatttgcaagatagattgtaaatgcacattaatatttactctcctaaatcaaaactataatattaagaaataatacttctaaagaaagaagaaagccatcacttaggcattctagaccattaaaaaaatctctacggtatggcaataataaaccattccatgattttaattgttaaataataattttatagctagaatttaaataacattaaaaaattgatgtacatatatttgtttgcattttaggaagcacactttcttgatctgactgctttaattcacaaatttctcacgaaaggcagaactacaatttatttagcccttatgcccacttttcgtcaaaaaaagatttttgatgataaggctgttaataagacattttgttagttgcatgtgtatagttaacaaggttaattattgctcagtgaaaatttcacaagcaaaactagtagtagtgcaatttctgtggaatgcactctctcctagtcatttgacatgcttagattttaatagtgaagacttaagcaaggtcttccatgatagtgccccagcctatcttttcaaattcatctgctacctcccatcaaatgctttacattgcagctaaattcttagtacaaagaaagaaacttaaaagggccaggcgcagtgtctaatgcgtgtaatcccagcactttgggaggccaaggcgggcggatcacttgaggtcaggagtttgagaccagcctggccaacatggcgaaactccatctctactaaaaatacaaaaatcgacagctgtggtggtgtgtgcctgtaatcccaggtacttgggaggctgaggcaggagtatcacctgagcccgggaggtggaggctgcattgagctgagatcgcaccactgcactccagcctaggcaacagagtgagagagagagaatcaaagagaaatcattgaggattttaagcagaagtccaatcattgaggattttaagcagaagtccaaaaacagccccatagtctaatactcaatatgttcctcataaggatttgccatttcctacctctctgcttaggctcctgttgtttttgtgctcagaatgtccttttgttgttctatcatgtatcagtttgctattgccacaataagtctgcataacagacttccaaatttacacttgtgtgtttgcaggcctactaggattggctgacctgagcagggttcaggcgggtagctctgcttaacactgtctcactggggttgactttttactgtgagctttgggcttaggtctgctccacatgtgttcattctgagcccaaggttggaggggaagtagctacccagtagcaatgtccaaagtgcaaaagtatgaccaagctaagctcattttaagcctttgcttgcagccaatctgttagcatctctttggccgaagcaagttacttggcccagtccatattccatgggtaggaaaggagctgcaaagttacaaaacaaagggtgaggaatcatgaatgggagaagactggggctggaaaatcaagcccccatcttcatatggtaaaatcctgcctactctttccccctgcttttttattttgttaaaaaaaaatacataatatcaaatttgccatctcttttttttttttttttttttttttgagacgagttggctctatcaccttggctagaatgcagtggcctgatcccagctcactgcaacctccacctcctgggctcaagcaattctcctgcctcagcctcccgagtagctgggactacaggtgcatatcaccacacctagctaatttttgtatttttgtagagatggggttttgccgtgttgcccaggctggtcttgaacgcgtgagctcaagggtcccacccatctcagcctcccaaagtgctgggattacaggcatagccaccgcccccagcaaatttaccattttaactttttttatgtatccagttcagtagtgttaagtatattcacagtcttttgtagtagatctttagaatattttcatctcgcctcactgaaaccctgtactcattgagcaacattttcccccctcccagccctgggcaaccactgttctgttttctgtttccatgagtttgactactctggataccacatataactagaatcatacagtatttgtctttttgtgactggcttatttcagttaccataatgtccttgagattcacctatgttgtagcatgtgacaagatttccttctttttaaggctgaacaatattccatttgtatgtatgtaccacattttctttatccattcatttgtcaatgggcattggagttgtttccacctctcagctattttaagcatcatggctcaattcaaatgccatctcctctatggcttccacaatcttttgaccaaaaggaattgttccttcctctgaaatgttattttattcataataaatgtattagtttctactttgtattcattataaatacctccttctgccatggaaggtccagtggggcaaatctctgggtaattttttatatcttcaatgtattggtgtttaagcattagtaaacaagttgttttaaatgaaaagatgttacagattttgttttgtcatggtaaaatatacataacataaaatttatcactttgggtgcagcaaaccactgtggtacacatatgcctatgtaccaaagctgcatgttctgcacatgtgaaaaaaaaaatttatcattttggcccggcatggtggctcacacctgtaattccagaactttgggaggctaaagcaagaggattgcttgaggctaggcattcaagaccaccctgggaaacatagcaagaccctgtctctacaaaaaaatttaaaaattagctgggtgttgtggtgtgtgcccgtagtcccagctgctaagtgggctgaggtggaaggatgccttgaacctggaaggttcaggctgcattgagctgttcagagaccctgcctataaatagataaataaataaacaaataaggacatataccttttggaaagaactccgtggtgcaaatttgcaaaggagaaaggcagtgtttctaaagtggagttttgtgttgcattagaatattacacaaatctattcattttatattttcctctattctatggagcgaacctgccttccttccttccttccttccctttttccttccttcccttttccctccctcccttccttccctttttcctccctccctcccttccttccttccctttttccttccttcttccttccttccttcccttttccctccctccctcccttccttcattccttccctccctttttccttccttccttccctttttccctcctttccttagagcagatgttctctgcaaatagttgttaatttattctgtattaagactattcagactctttcaagcttgctgctgtagcttaggtggatatttttggattacaaccatttaacagagcctcctatgatacgagttgtgaatagctatgaggcacatggcagagtggaaatagggaaatgatacatcataatgctaagctctaagtcttggcagactaacattaacatgaatttttagctcttcttgaggttgaaaaatagcttcaacattcacatttatctttaataagtgttgagcacttaagcactttcagtgtatgttatggaagagcttgttcggagttctttctgaaggtttggacagggaatttatgtcctcttaaggagagcattggatttgaatgatgattttcagctgaaagcagtagaaagataacaatagtgttatttgtactagaattttctctaatttcatgtcattaatcctgtgattaacagtcttactatgttgctagttcctgggcaaattttcctaatagccatgattatagaagattgtgatatttaatgcttataagtgtcaaggggcctaaaagctaaggtggtaggaggctttcttacaattcaaagattttgagacttattctataacagggttttgcatgtgtgcatttaaaacatttttaaaaatatacagtatttaagtagatttttttaaaaagtgttatccttgtataggggacatgctaatcttctctgtatcattccaatttaagtatatatgctgctgaagtgagcctttttttttttaacacagggtctcactctgctgtccatgctggagcgcagtggtgtgatcatggctcactgcagcctcaacctcccagggtcaagcaatcctcccacgtatgtaggcctacaggcgcactccacgaggcctggctaatttttttatactttaagtttttgtagagacaggggtctcactgtgttgcccaggccggtttcgaactcctgggctcctaatgatcctcctgctttggcctcccaaagtgctaagattacaggtacgagcaactgctcccagcctgaactttcttagtgttcattctaaaatatataatgtttgaaaagtccaaattaattaaacatgtaagctggaagatttgagatctggtttatctttctgattttttgtgtatttatatatttttttactttaatttttttgagttctggggtacatgtgcagaatgtgcaggtttgttacataggtaaacatgtgccgtggtggtttgctgcacctgttaacccatcactgaggtattaagcccagcatgcattaactcttttccctaatgctctccctggcacctccaacaggccccaacaggcactagtgtgtgttgttcccgtccctgtgtccacgtgttctcattgttcagctcctgcttataagtgagaacatgcagtgtttagttttctgttcctacgttagtttgctgaggataatggcttacagcttcgtccatgtccctgcaaagcgagaacatgcagtgtttagttttctgttcctactaatgttagtttgctgagaataatggcttacagcttcatccgtgtccctgcaaaggacatgatcttgttcctttttatggctgcatagtattccatggattgtgtatattattagacttaatctcaccagtgttttagcttcctcagctggaaggatgttgatgtaaaatgcagataatagatgaaaagcaatgtgtgtttttcacatgaataacgacatttcacatgataatcggtttctctcttataatgtccaacctagtgtggactctcttaaccataatccttttaattagtacttaaatagattttttttaaaaattctagatacacttgtgattttttttttctaattgtttagttgataaccagcattttctttttcaccagcagccaaaacagggctgtgtgagaagcgtccgtttcattaacaatgaagtgatcaaatgcactcaggcctgtagatcatctaccatagtgcctggaacatataatatgctccataaatacaagtacttcccctgcctttacagtgggatcacttgctgaggtgatttccgcagcctctgcaggtgctgtggatctttaggaagagtgtaagcgcttgatgtaggcttctggagaaggagcatgtatcaggcctggcagccactaggcgcttctcagaagagaaactgagcaagaaagctctgtgtggtctgtacaggaaggactctccctgccattctagtctactgttacagaacttcgttcagcccataaccagcaggcagaatcaatgaggcagagacttggattcatatctttacatagttggtcaccacattgactaaatttctgcttgagtcataaagttctagagacaaaggagcgaatagaggaggcagctattacttccgcttggggaggagcttaaaactagggtggctgtatgtctgttttcctgagaaattgtatggtcaaactactaaagtgggagagaggtattaagaaatgagaggatataactggggaaagtgacctcatctggaagtggacagagaaagcttttctagggaaatgactgacgaggagacctgaagaatcaggaagaagtacagtattggtgaaaatgggtcatgtgctcacttatctagggtccctgaacttgcccttttttccctgtgcctagaagagaggatgtcccacatcatgttcttttccctttaaacattactattacatgtgaagtagaacagtgttttacaaacagcaggtactaatctatgggatataaagttaacttagtgagttagtaatctgatttaatatgtatagtagaaaataaatatatatttaatatatattagaaaatatcaagtagaaaataaatatatatttaatatatattagaaaatatctatatatattagaaactatcaatagcggaagtaatagctgcctcctctattcactcctttgtctctagaacattatgactcaagcagaaatttagcagagtacattgtacatagtaagaaagtattgaaataaaatatttatgtgtgcaggtacttggtcacaatataaagtgtattttttacagtagatcatagtcaaaaactttttttttttggagacagggtctcactctgtgaagcacagtagtgcgatcacagcccactagcctcagccttgctgggctcaggtgatcttcccacctcagccttctaatttgagtagctggggccacaggtgcacaccaccacacttgactaatttttgaatgttttgtagagatggagtttttccatgttgcccaggctgtctcatgaactcctgggctcaagcagtccacctgcctctgcctcccaaagtgctgggtttacaggaataagccactgtgcccagcgtcaaaaacttttatacattttgtctagaacaagtggaagtaaaattgcactactgtcttgtactccttgtagtataattgcattttcagttatttactgagtatctggagaaagtgagaagaataggaatgtggctcaaactgggaagggactacattattcagtgccttctagtcctttttacggatttggggttttatcctaagataaatggaaagtgattgaagtgttagctatttcttattgggtcaccatttgtttgtttgtttgtttgtttgagacagtcttgttctgtcacccaggctggagtttagtggcacgatctcagctcgctgcaaccttgcccccccaccccaggttcaagcaattctcgtgcctcagcctccagagtagctgggattacaggcacatgtcaccatgcccggctaatttttgtatttttagtaaggttgggatttcaccatgttggccaggctggccaccattttgttttttttttttttctttttttttttttattatactttaagttttagggtacatgtgcacattgtgcaggttagttacatatgtatacatgtgccatgctggtgcgctgcacccactaacttgtcatctagcattaggtatatctcccaatgctatccctcccccctccccccaccccacaacagtccccagagtgtgatattccccttcctgtgtccatgtgatctcattgttcaattcccacctatgagtgagaatatgcggtgtttggttttttgttcttgcgatagtttactgagaatgatgatttccaatttcatccatgtccctacaaaggacatgaactcatcattttttatggctgcatagtattccatggtgtatatgtgccacattttcttaatccagtctatcattgttggacattcgggttggttccaagtctttgctattgtgaataatgccgcaataaacatacgtgtgcatatgtctttatagcagcatgatttatagtcatttgggtatatacccagtaatgggatggctgggtcaaatggtatttctagttctagatccctgaggaatcgccacactgacttccacaatggatgaactagtttacagtcccaccaacagtgtaaaagtgttcctatttctccacatcctctccagcacctgttgtttcctgactttttaatgattgccattctaactggtgtgagatggtatctcattgtggttttgatttgcatttctctgatggccagtgatgatgagcattttttcatgtgtttcttggctgcataaatgtcttcttttgagaagtgtctgttcatgtccttcgccaactttttgatggggttgtttgtttttttcttgtaaatttgtttgagttcattgtagattctggatattagccctttgtcagatgagtaggttgtgaaaattttctcccattttgtaggttgcctgttcactctgatggtagtttcttttgctgtgcagaagctctttagtttaattagatcccatttgtcaattttggcttttgttgccattgcttttggtgttttggacatgaagtccttgcccatgcctatgtcctgaatggtcatgcctaggttttcttctagggtttttatggttttaggtctaacgtttaaatctttaatccatcttgaattgatttttgtataaggtgtaaggaagggatccagtttcagcttcctacatatggctagccagttttcccagcaccatttattaaatagggaatcctttccccattgcttgtttttctcaggtttgtcaaagatcagatagttgtaggtatgcggcattatttctgagggctctgttctgttccattgatctatatctctgttttggtaccagtaccatgctgttttggttactgtagccttgtagtatagtttgaagtcaggtagcgtgatgcctccagctttgttcttttggcttaggattgacttggtgatgcgggctcttttttggttccatatgaacttgaaagtagttttttccaattctgtgaagaaagtcattggtagcttgatggggatggcattgaatctgtaaattaccttgggcagtatggccattttcatgatattgattcttcctacccatgagcatggaatgttcttccatttgtttgtatcctcttttatttccttgagcagtggtttgtagttctccttgaagaggtccttcacatcccttgtaagttggattcctaggtattttattctctttgaagcaattgtgaatgggagttgactcatgatttggctctctgtttgtctgttgttggtgtataagaatgcttgtgatttttgtacattgattttgtatcctgagactttgctgaagttgcttatcagcttaaggagattttgggctgagacaatggggttttctagatatagaatcatgtcatctgcaaacagggacaatttgacttcctcttttcctaattggataccctttatttccttctcttgcctaatttccctggccagaacttccaacactatgttgaataggagtggtgagagagggcatccctgtcttgtgccagttttcaaagggaatgcttccagtttttgcccattcagtatgatattggctgtgggtttgtcatagatagctcttattattttgaaatacgtcccatcaatacctaatttattgagagtttttagcatgaagggttgttgaattttgtcaaaggctttttctgcatctattgagataatcatgtggtttttgtctttgcctctgtttatatgctggattacatttattgatttgcgtatattgaaccagccttgcatcccagggatgaagcccacttgatcatggtggataagctttttgatgtgctgctggattcggtttgccagtattttattgaggatttttgcatcaatgttcatcaaggatattggtctaaaattctcttttttggttgtgtctctgcccagctttggtatgagaatgatgctggcctcataaaatgagttagggaggattccctctttttctattgattggaatagtttcagaaggaatggtaccagttcctccttgtacctctggtagaattcagctgtgaatccatctggtcctggactctttttggttggtaaactatcgattattgccacaatttcagctcctgttattggtctattaagagattcaacttcttcctggtttagtcttgggagagtgtatgtgtggaggaatttatccatttcgtctagattttctagtttatttgcgtagaggtgtttgtagtattctctgatggtagtttgtatttctgtgggatcagtggtgatatcccctttatcattttttattgtgtctatttgattcttctctctttttttctttattagtcttgctagtggtctatcaattttgttgatcctttcaaaaaaccagctcctggattcattgattttttgaagggttttttgtgtctctatttccttcagttctgctctgattttagttatttcttgccttctgctagcttttgaatgtgtttgctcttgcttttctagttcttttaattgtgatgttagggtgtcaattttggatctttcctgctttctcttgtgggcatttagtgctataaatttccctctacacactgctttgaatgcgtcccagagattctggtatgttgtgtctttgttctcgttggtttcaaagaacatctttatttctgccttcatttcgttatgtacccagtagtcattcaggagcaggttgttcagtttccatgtagttgagcggctttgagtgagattcttaatcctgagttctagtttgattgcactgtggtctgagagatagtttgttataatttctgttcttttacatttgctgaggagagctttacttccaactatgtggtcaattttggaataggtgtggtgtggtgctgaaaaaaatgtatattctgttgatttgggttggagagttctgtagatgtctattaggtctgcttggtgcagagctgagttcaattcctgggtatccttgttgactttctgtctcgttgatctgtctaatgttgacagtggggtgttaaagtctcccattattaatgcgtgggagtctaagtctcttcgtaggtcactcaggacttgctttatgaatctgggtgctcctgtattgggtgcatatatatttaggatagttagctcttcttgttgaattgatccctttaccattatgtaatggccttctttgtctcttttgatctttgttggtttaaagtctgttttatcagagactaggattgcaacctctgcctttttttgttttccatttgcttggtagatcttcctccatccttttattttgagcctatgtgtgtctctgcacatgagatgggtttcctgaatacagcacactgatgggtcttgactctttatccaatttgccagtctgtgtcttttcattggagcatttagtccatttacatttaaagttaatattgttatgtgtgcatttgatcctgtcattatgatgttagctggtgatattgctcgttagttgatgcagtttcttcctagtctcgatggtctttacattttggcatgattttgcagcggctggtactggttgttcctttccatgtttagtgcttccttcaggagctcttttagggcaggcctggtggtgacaaaatctctcagcatttgcttgtctgtaaagtattttatttctccttcacttatgaagcttagtttggctggatatgaaattctgggttgaaaattcttttctttaagaatgttgaatattggcccccactctcttctggcttgtagggtttctgatgagagatccgctgttagtctgatgggcttccctttgagggtaacccgacctttctctctggctgcccttaacattttttccttcatttcaactttggtgaatctgacaattatgtgtcttggagttgctcttctcgaggagtatctttgtggcgttctctgtattttctgaatctgaacgttggcctgccttgctagattggggaagttctcctggataatatcctgcagagtgttttccaacttggttccattctccccatcactttcaggtacaccaatcagacgtagatttggtcttttcacatagtcccatatttcttggaggctttgctgatttctttttattcgtttttctctaaacttcccttctcgcttcatttcattcatttcatcttccatcgctgataccctttcttccagttgattgcatcggctcctgaggcttctgcattcttcacgtagttctcgagccttggttttcagctccatcagctcctttaagcacttctctgtattggttattctagttatacattcttctaaatttttttcaaagttttcaacttctttgcctttggtttgaatgtcctcccgtagctcagagtaatttgatcgtctgaagccttcttctctcagctcgtcaaagtcattctccatccagctttgttccattgctggtgaggaactgtgttcctttggaggaggagagacgctctgcgttttagagtttccagtttttctgttctgttttttccccatcgttgtggttttatctacttttggtctttgatgatggtgatgtacagatgggttttcggtgtggatgtcctttctgtttgttagttttccttctaacagacaggaccctcagctgcaggtctgttggaataccctgccgtgtgaggtgtcagtctgcccctgctggggggtgcctcccagttaggctgctcgggggtcaggggtcaggaacccacttgaggaggcagtctgccggttctcagatctccagctgcgtgctgggagagccactgctctcttcaaagctgtcagacagggacatttaagtctgcagaggttactgctgtctttttgtgtgtctgtgccctgcccccagaggtggagcctacagaggcaggcaggcctccttgagctgtggtgggctccacccagttggagctgcccgctgctttgtttacctaatcaagcctgggcaatggcgggcgcccctcccccagcctcgctgccgccttgcagtttgatctcagactgctgtgctagcaatcagcgagattccgtgggcataggaccctccaagccaggtgtgggatataatctcgtggtgcgccgttttttaagtcagtcagaaaagcgcagtattcgggtgggagtgacccgattttccaggtgcgtccgtcacccctttctttgactcggaaagggaactccctgaccccttgcgcttcccaggtgaggcaatgcctcgccctgcttcggctcgcgcacggtgcgtgcacccactggcctgcgcccactgtctggcactccctagtgagatgaacccggtacctcagatggaaatgcagaaatcacccgtcttctgcgttgctcatgctgggagctgtagaccggagctgttcctattcggccatcttggctcctccctccccacaccattttgtttttaactataattaatatgaagggaatttgggaaccaggattgaataagggctgtctgataaatgctctatttctttaataaacatttattttatctactgtgttttccatataagcttatagtaggtactgtcatctgcaagataggcttaatacctcatagcattactgtgaacattaaatgagtttatatgtgtcatctacacattcaacagatgttttagtgactttttttgttttacctctgcctctttaggaccacactctgaaaagagcatgccttgtttcaatgattgttttagtcatacaattgccagaataaataaaatacactcagaaagaattatacctaatttaggccaggcatggtggcccacacctgtaatcccagcgctttggaaggccaaggtgggaagatcacttagagtttgaaaccagcctgggcaacatagggagaccttgtctctacagaaaatggagtgtgtgcctatgttctcagctgcttgggatgctaaggcaagaggctcacttgagcccaggaactgagctgcagtgagccatgattgtacaattgcactccagcctgggtgacagagcaagaaccagtctaaaataaataaataaaaaaaaaaaaatgaattgtagctaatttggtattcctgttgttgaaaggaaaagtggccactactctcaggctatttccacaggagaatatgatgttgacataattttgaaatggtgaaattatatcagaattttaaaataaatcaacatgtagttcctccatcttttcttcccctgtcctgaagcataatattatgtttggccattttgttgctttgtggttagaaaaatgtcagtgtggcaagtgaagtaacatttccacttatctctatttccctctcccctttagatttcaccacccaatcctcagtcctttggaaagcagtttccagctggaagttgacgtcctgtgtcatctcctgaaagcccaggcccaggtctcagagtggaagttcctcccatctctggttaatttacacagtgcgcacaccaaactgcagacgtggggccagatctttgagaaacagcgggagaccaagaaacatctgtttggagggcagtctcagaaggccgtgcagcctccacaccttttcctttggctgatgaaactcaaaaacatgcttcttgccaagtttagcttttactttcatgaggctctgagccgacaaacgactgcttcagaaatgaaaacgttgacagcaaaagctaacccagacttttttggaaagatttccagcttcatcagaaaatatgatgctgccaatgtgtccttaatttttgacaacagaggttctgagagttttcagggtcatggttatcaccacccccattcctacagagaggcccccaagggtgtggaccagtatccagctgtagtgtctctgcccagcgacaggccagtcatgcactggcccaatgtcatcatgatcatgacggaccgcacatctgatctgaacagcttggagaaagtggtccacttctatgatgacaaagttcagagtacctacttcctaacccgcccggaacctcactttaccattgtcatcatttttgagtcaaagaaatctgagagagactcccactttatttccttcctcaatgaggtctcacttgcccttaagaaccccaaagtgtttgcaagtctgaaacctggagccaaaggttagcaggtgatttgcgtggaggggtttcaagactagaaactgttcttaattgccctaatgatctacggtggtctgtgaatagagtttacatccattcatgcctctttcagaactaaattaaagacaaatcctccctgtgttgcacactttataagcaattaaggccaattgaattaagtttccaaagagtaatctaggaagtggtcatgggctaccatgtgtctccatggtacagcaaagtagtttcagtattttcccctattttgctatatttcttgtagattgaatatttattgggcttttttttttcccatatgtttttctgttgttctaaacattgtgttctactgcaattccaaacagcctctctgtttccctccttcttggaagagtaatagggatgagatattaaatggcctttttagaattaagaactatatgttttctgtctcataaattagcaaatgaatatggagttagtagatttatgattctgatctacaaattaacatttttgatgccaaaattagggtcttggtaagaaatttctatcagttattgaaactgaaagtgagtcagattggtagcatgacgtaaggttttaacagttcagaagatcctcatggcagctttaatagccatgggttcttttggggtaatgtacacacctaactgcatttgttttgacttctttaatgtttgaatgtttcactctgttgtaaagtcagcataagccatcatgtgggctttcttcattcttcagcatattatccgcttcgctttctgtttatcacttttctgctgaaatgtacatgtttggctctactccttggttatttttaggcttaaaagcatgcagtcggtttttcagccacttttagatactcatgcaacatagcctacttttataaaatcaaaatgaaggtcttcatacgctgtacttgctaaaaatcaactgtgcgcttgaaagacctcttcatagttgagtaatcacctcagtacttaagcacttctgaacttgggtttcatgcctgccccccacaaattatgtttagaagcagcactgcatcttagcacatgctgccttatttctttccttcggcaggtgttcatgggaagtaggtggatcagtgaaggcataatgggctgtggagaccttcacttctagattattgattcaaaataaaaagaagccacaaagagtaattgagttgttactggtttgatggttcctttgaagcttgtgtgaaatgtaatggtcatattcgtcttttttcccatgattgtgtggagccactgttttactgggtgtccacagcaggtatgccagcaacatcagcagagaccagagagcccctcagagtccatgtaggaagcctgcccacctagggtggactgcctggcagaagaaagaagaaccggccaggcacggtggcacacgcctgtaatcccagtactttgggaggctgagacgcgtggatcacttgaggtcaggagttcgagatcagcgtggccaacatggtgaaaccccatctctactaaaaatacaaaagttggccggttgtagtgacgggtgactgtaatcccagttactctggaggctgaggcaggagaattgcttgaacctgggaggtggaggatgcagtgagctgagactgtgcagctgcactccagcctgggtgaaagagcgagacctgtctcaaaaaaaaaaaaagaagaagaagaaccaagaatctactggcctattttttattttctgggaagaacatgtgtttttcctttttttttttttttttttttgagacagggtcttgtctgttttccaggctggagtacagtggcacaatcacaactcactgcagcctcaacctcctgggctcaagtgatcctcccacatcagcatcccgagtaggtgggattacaggcatgagccatcacacctgggtctcactatgttgctcgggctggactcaaactcctggactcacatgagcctcccgcctcggcctcccaaagcactgggtttataagcatgtgccactgcacctggcctcctttctttttctttaaaaatggtcataagctttgtaaaaagctagtttgctttaaatagaaagtagtgatttacctctgcattttattcactcaggttctataaaaaaagtctcagcagattttacaacattgaccttacctaagaaattgaaagcaattggagctaaaaagtcaaatcacttttcctctctattgtgttctgccaagaaactgaaaaatattccttggtatgcatgtatttttttcctcttagattaaaccaccattagccttaatgacacagtcccccaaatacctagaagaatatatacttcagtggaaccccgagagaggtgtaagtaaagcatatatatgttatttaaataaccagtcctcacctagaacatatttgaattgtatatctatttttaaacataaacacaaaaagaatttcaaagaacagaaggcagatgtgaatattaagaaaatctaagacaatatgtattactgtgcagctgtcatagactgtactggaagagtttttgaagattgaatattgatacttaaattatttctgaagctcttcaataaagttttctaattataaaaactccacataatttggttcaagccaagaaacaaagtcattttactctaagatttattctctaaatatagtaatgagatctgtaaagtctgtgttttgctaattaaaagagtaaatctgcgtattttctgcagactgctttctttgaatctgtttctaaaccacaacttgataagtttttatgggtaactgggaatatggtcaacactgagttttccaagggttccatccaggagtatttcattttaggatgctgtttggacacagggtttgtaactttgttctctctgggtcctacctgatctctggctgtgtcatttcagggagtgtgtgaaaataaagcccagttcttaaccaaggagccaatacccttgatataattgctttggatatttggacatattgggagaaatgtgtccaaatacttttcttttctttctttctttctttttttttttgaaaaggcaaggtctgtcgcccaggctggagtacagtggcatgatcatagctctctgcagctttgaactcctaggctcaacagtcctcttgcctcagcctcccgagtagctaggaccatgcctggctaattttaaaaaaatattttagagatagggtcgcactatgttgctcaggctggtctcgaaatcctgggctcaagtgatcctccctctttagcttcccaagtgggaatacaggtgtgagccactgtgtccagcagaaaatgtactttctagaaagaaaataattggtacttcactactttcccagggaattccttcaggtgaatgtccacccttttgatctagaagcagactcacaattttgtttgtttggcaaatcagcctctgagctcaacttccttgtctgtaaaatggggctaaggaaatgtgggttgctttttcaaaggttactgttaggatggaatgagatcatgtgtgtaacaaaggctttggaaactttctggaatttgaaggctatataaataaaagatggaccactctttccttaaatttggcacctttcctgttcttttctttctcttcaattctgtggcaaacctgtacctagttattatgtttgaaagagaactggtttagaagaggaggcagataaatgcctaaccaacctacccactcttcctattttagaatctttgtggttttttgttcccaaatttttatggttggttgatagcatcattttagttctcctatattatgatttctttttttttcctttggttactctatcaattactgagcgaggtattttaaaatctccagcactgcttgtggatttgtgattttcttcctttatttctgtcagtttttccatcctgtattttggagccctgtcattaggcccatatacatttatagtttttatttctcttgtattcaccattttatcattatgaagtttcctgctttatctccactgctactgcttactccaaagtccattttgcccagtgtttttatggcccttccagctttcttatgcttactgtctgtggtgtgtgtgtgtgtgtgttttccatgttctcatttttaacttacttatttatatctttgtatttgaagtgtctatagacagaactaaggagataagacagattaaaaagaacaacaatctctgccttttgatgggaatgtttagtttacttctcgtgtaaggtttttacagtcaggattttgatgacagtatccttgaactatcacttgtttttcatccttttttccccctttatattggaagttagagcaagatgtttaatcagattcagcttttctttgtgtagtggtgttgtatattttattaggaagcagctaacaactggcattgcctagatagattatatcattagaggttacaaaatggtaatattctaattgttattccttttctcattattagccagaatacatctacaaagagaaattcacctccaactatttagtaccttgaagtacagttcatatggaatggatggataaatccttgattcttttgcttttctttattttatttatttatttattttttgggatggagttttgctcgctcttgttgcccaggctggagtgcaatggcacgatctcggctcaccacaacctccgcctccagggttcaagtgattctcctgcctcagcctcctgagtagctgggactacaggcacgtgccaccatgcccagctaatttttgtatttttagtagagttggggtttcactatgttggccaggatggtctccatctcttgacctcatgatctgcttgcctcagcctcccaaagtgctgggattacaggcatgagtcaccgtgcctggcctttatttatttatttttactagttcttaacatatttagttccttagcatcttccagacaatggggagttttaaaagaaatgtatatgaatttataaggatttctgactcttaggtttaaccctgaatttgaaataaagcagccgttttctccctgaccacaagattttttttggtaaatattatgactttcctttattccttcctcatggttaattttctctcttaattactgttgattatttattttcctccacattttttcctctccctctccctctccctctatctctcttcctccctctttccttcttttcctctctcttttccttccttctctccctcccatcctcttacctttttcttctctgtcacccaggctggagtgcagcggcacaatctctgctcactgcaacctctgcctcctggttcaagcaattctcgtgcctcagcctcatgagtagctgggattacaggcatgcgccaccatgcccggctaatttttgtatgtttagtggagacggggtttcaccatgttggccaggctggtctcaaactcctgacctcaggtgatctgcccacctaggcctcccaagtgctgggattacagacgtgagccactgtgcccagccccatcctctcttaccttagtttctgatttctttctcatagcttctgctttagccacctttcttcccatgcctctgagatccaggacatacaccagtagtctctgacccagttttgggaaacagcatctgaaagtattcattttgattgtttttataaccagttactttttttcaggcagcgaggaaggaatacatagagggggaaaggtcagtgttgatactaatagggtgaccacaattaatcctagccacttcatgaacacacaaggcctttggccaactgcggccaagcattgctgtatgtatttggcaggttatttggcaggaaaagttactcaaaactaaaatcttttcaagtgtatttttaccatgttatttattattattatgtaaaagatcacttttagtgtatttgcactaattattgtataaaagcattaaagtagcctctgatttttttcaagtaaaaatgtaagaaaactagattttttttctcctaagtgagaaacaaaaaacatgctatgtgactccccacaaaagccctgtaggtttaatttaatttagcaattccctctctacttttctaccaggttcctgttaccaatgcaattatttcgtggccttttgcctgaattattctaagctgcttctccagaggaaatgagtcagaagaaataggcttgatgtgcatttctgcctttggagacttctcttgatatggtgtaaatccgtaaggtttcattaatgccttgtctgcatattttttcaatctgcttttgataacaaggtctgtttctagggtacttcaaatttaaaaccgtagggtatgtgtaaaatatcaccactagaaaatggagagatgcaaatgggttcccccttctgtagtccctcctaatgtcagaatctggggttagggttctaagtgatggtagcactcaggagagggtcacaagaggcaatgacatgggactgcatcctgaaagatgactgcttagacgtgcggcgagaatggccggaaaacggaggatggcgcttgacattgatctaggaaaggaagacagtcattgggacttttgctaactttgtccctagagagtgaattctgcttttgctggtcctaaaaactgtagagtaattctacaatccagttaaatttgtaaatctaatgcctgattcagtctgagatttatgactcagccggttgatccagcttaggtctagactcatttcacttttgttatgacaagatacgacaatgtagggcacaccctttaccccccagggtcatcctgatgtcagtcatttcaggctaggccagtgtcagagcagtccctgaagcagaagtggatggaaagaggtgaatgatttctaatattcaacattcattaatttaacatcaactatgttaagggtaatgatatagcagttaaccaagaccaacatggtgtctgcttggttgatgcttgaaataaggtgacctggccccagccacccgggtggccaggagctgaaagggctgtaacaagtaggcagtgaatagtcttcaaacttgttacttgcatacctccctacaaattttggaaaaaccatgagactctgattgattttttaaaagaatatctaaaatcattatgtttaaatagcctcaaaagaagcattttattatgtattgtaaatattggcattttaaaatgttattcggtcttttaaatgtatccagtgaaatgttggtacaatagagttttgatagctaccattttccatttttaaaaatactttaacacgctttgtaacagttggaaatattgtttgattccttttgctccctgaactccattcttcttcttctgaagaattttatcctaaaatgaatttattttttgcttaacagtcttattggttaccttattaaatattactcagtata
